(19) United States
(12) Patent Application Publication
(10) Pub. No.: US 2004/0025202 A1
(43) Pub. Date: Feb. 5, 2004

(54) Nucleic acid molecules associated with oil in plants

(76) Inventors: Cathy C. Laurie, Winchester, MA (US); Monica Ravanello, Vacaville, CA (US); Thomas Savage, Sacramento, CA (US); John R. Ledeaux, Creve Coeur, MO (US); James A. Rogers, Hingham, MA (US)

Correspondence Address: MONSANTO COMPANY, 800 N. LINDBERGH BLVD., ATTENTION: G.P. WUELLNER, IP PARALEGAL, (E2NA), ST. LOUIS, MO, 63167, US

(21) Appl. No.: 10/389,566

(22) Filed: Mar. 14, 2003

Related U.S. Application Data
(60) Provisional application No. 60/365,301, filed on Mar. 15, 2002.
(60) Provisional application No. 60/391,786, filed on Jun. 26, 2002.
(60) Provisional application No. 60/392,018, filed on Jun. 26, 2002.

(51) Int. Cl. A01H 1/00; C12N 15/82; A01H 5/00

(52) U.S. Cl. 800/281; 800/320.1

(57) ABSTRACT

Polynucleotides that encode proteins associated with oil content in plants are useful in constructs to make transgenic plants, e.g., maize or soybean, with desirable oil content phenotype and progeny of any generation derived from the fertile transgenic plants. Markers associated with oil content QTL are useful in breeding for plants with desired oil content.

### REFERENCE TO RELATED APPLICATIONS

[0001] This application claims priority to U.S. Provisional Applications 60/365,301 filed Mar. 15, 2002, No. 60/391,786 filed Jun. 25, 2002 and No. 60/392,018 filed Jun. 26, 2002, herein incorporated by reference in their entirety.

### INCORPORATION OF SEQUENCE LISTING

[0002] Two copies of the sequence listing (Seq. Listing Copy 1 and Seq. Listing Copy 2) and a computer-readable form of the sequence listing, all on CD-ROMs, each containing the file named 52900.ST25.txt, which is 9,302,045 bytes (measured in MS-DOS) and was created on Mar. 13, 2003, are herein incorporated by reference.

### INCORPORATION OF TABLES

[0003] Two copies of Table 1 (Table 1 Copy 1 and Table 1 Copy 2) all on CD-ROMs, each containing the file named 52900_Table 1.txt, which is 226,395 bytes (measured in MS-DOS) and was created on Mar. 14, 2003, are herein incorporated by reference.

### FIELD OF THE INVENTION

[0004] Disclosed herein are inventions in the field of plant molecular biology, plant genetics and plant breeding. More specifically disclosed are nucleic acid and amino acid molecules associated with oil in plants, particularly oil in maize. Also disclosed are genetic markers for such nucleic acid molecules and genes and QTLs associated with oil in maize. Such markers are useful for discovery and isolation of genes useful in enhancing the level of oil in plants and for molecular breeding of maize with enhanced levels of oil. Also disclosed are transgenic plants with altered expression of one or more genes associated with oil.

### BACKGROUND OF THE INVENTION

[0005] Maize, Zea mays L., is one of the major crops grown worldwide as a primary source for animal feed, human food and industrial purposes. Maize plants with improved agronomic traits, such as yield or pest resistance; improved quality traits such as oil, protein or starch quality or quantity; or improved processing characteristics, such as extractability of desirable compounds, are desirable for both the farmer and consumer of maize and maize derived products. The ability to breed or develop transgenic plants with improved traits depends in part on identification of genes associated with a trait. The unique maize sequences disclosed herein may be useful as mapping tools to assist in plant breeding and in designing transgenic plants. Homologous sequences in plant species other than maize and in fungi, algae and bacteria may be useful to confer novel phenotypes in transgenic maize and other oil-producing plants.

[0006] Increases in the oil content of maize seeds can be achieved by altering the expression of one or more genes that encode a protein that functionally increases oil production or storage. Effective changes in expression may include constitutive increases, constitutive decreases or alterations in the tissue-specific pattern of expression. See, for instance, U.S. Pat. No. 6,268,550, which discloses that a higher oil content soybean is associated with a twofold increase in acetyl CoA carboxylase (ACCase) activity during early to mid stages of development when compared with a low oil content soybean. In view of a correlation of increased expression of the ACCase gene with an increase in the oil content of the seed, it is predicted that over expression of the ACCase enzyme is likely to lead to an increase in the oil content of the plants and seeds. Because metabolic pathways affecting oil production and storage are complex and controlled by a large number of enzymes and transcription factors, there is a need to discover and modulate the expression of other genes associated with oil.

[0007] Polymorphisms are useful as genetic markers for genotyping applications in the agriculture field, e.g., in plant genetic studies and commercial breeding. See for instance U.S. Pat. Nos. 5,385,835; 5,492,547 and 5,981,832, the disclosures of all of which are incorporated herein by reference. The highly conserved nature of DNA combined with the rare occurrences of stable polymorphisms provide genetic markers that are both predictable and discerning of different genotypes. Among the classes of existing genetic markers are a variety of polymorphisms indicating genetic variation including restriction-fragment-length polymorphisms (RFLPs), amplified fragment-length polymorphisms (AFLPs), simple sequence repeats (SSRs), single nucleotide polymorphisms (SNPs), and insertion/deletion polymorphisms (Indels). Because the number of genetic markers for a plant species is limited, the discovery of additional genetic markers associated with a trait will facilitate genotyping applications including marker-trait association studies, gene mapping, gene discovery, marker-assisted selection, and marker-assisted breeding. Evolving technologies make certain genetic markers more amenable for rapid, large scale use. For instance, technologies for SNP detection indicate that SNPs may be preferred genetic markers.

### SUMMARY OF THE INVENTION

[0008] This invention provides genes that have been identified as being associated with high oil in maize. An aspect of this invention provides homologs of such genes from a variety of other plant species and other organisms, e.g., fungi, algae and bacteria. Nucleic acid molecules derived from such genes and homologous genes that encode proteins that are effective in the production or storage of oil in plant seeds are useful in other aspects of this invention, e.g., DNA constructs for producing transgenic plants and seed with higher or lower oil. Thus, a particular aspect of this invention is transgenic plant seed having in its genome a recombinant DNA construct comprising at least one oil-associated gene of this invention operably linked to a promoter that is functional in the plant to transcribe the oil-associated gene. In one preferred aspect of this invention such transgenic plant seeds can grow into plants having enhanced seed oil as compared to wild type. Conversely, an alternative aspect of this invention employs gene suppression technology, e.g., RNAi gene suppression, to provide transgenic plant seeds having a recombinant DNA construct which includes DNA effective for suppression of an oil-associated gene. Such seeds can be grown into plants having reduced seed oil as compared to wild type. Alternatively, the suppression of the oil-associated gene could lead to plants with increased seed oil compared to wild type, depending on the action of the gene. In another aspect of this invention, the oil-associated gene can be over expressed or can be expressed in a tissue- or stage-specific manner to alter the oil content or properties of the plant seed as compared to wild type.

[0009] Another aspect of this invention provides hybrid maize seed that is produced by crossing two parental maize lines where at least one of the parental maize lines is a transgenic maize line that has in its genome a recombinant DNA construct for producing transgenic maize with enhanced seed oil as compared to its parents, e.g., its non-transgenic ancestors. Such hybrid maize seed will have a recombinant DNA construct comprising at least one oil-associated gene of this invention operably linked to a promoter that is functional in maize to transcribe the oil-associated gene. Still another aspect of this invention provides hybrid maize seed that can produce maize plants characterized by agronomic traits of seed oil level, yield and standability. Preferably, seed oil level is greater than seed oil level in said closest non-transgenic parental lines and, even more preferably, there is essentially no reduction in yield and standability traits in said maize plants as compared to yield and standability traits for said closest non-transgenic parental lines.

[0010] Still another aspect of this invention provides methods of producing hybrid maize plants having enhanced levels of seed oil production or seed oil storage as compared to the closest non-transgenic ancestor maize lines. Such methods comprise producing a transgenic maize plant having in its genome a recombinant DNA construct comprising at least one oil-associated gene of this invention operably linked to a promoter that is functional in maize to transcribe the oil-associated gene. Such methods further comprise crossing transgenic progeny of transgenic maize plants with at least one other maize plant to produce hybrid maize plants having enhanced levels of seed oil production.

[0011] Yet another aspect of this invention relates to a method for producing vegetable oil by growing and harvesting oil from plants of this invention.

[0012] This invention also provides maize oil markers that have been identified as statistically significant in associating with high oil in maize. Such markers are especially useful in methods of this invention relating to breeding maize for high oil. More particularly, this invention provides a method of breeding maize comprising selecting from a breeding population of maize plants a selected maize plant with higher oil than other maize plants in the breeding population based on allelic polymorphisms associated by linkage disequilibrium to a higher seed oil-related trait, where the selected maize plant has 1 or more higher oil alleles linked to a maize oil marker of this invention. The maize oil markers are also useful in a method of breeding maize comprising selecting a maize line having a haplotype characterized by the maize oil markers. The maize oil markers are also useful in methods of this invention for identifying other polymorphic maize DNA loci, which are useful for genotyping between at least two varieties of maize. More particularly such a method comprises identifying a locus comprising at least 20 consecutive nucleotides that are linked to a maize oil marker locus of this invention. Thus, a further aspect of this invention provides methods of breeding maize comprising selecting a maize line having a polymorphism associated by linkage disequilibrium to a seed oil-related trait locus where such polymorphism is linked to a maize oil marker of this invention.

[0013] Aspects of this invention related to maize oil markers are isolated nucleic acid molecules that are useful for detecting a polymorphism associated with oil in maize, e.g., molecules that are known in the art as PCR primers and hybridization probes for using the markers in genotyping.

### DETAILED DESCRIPTION OF PREFERRED EMBODIMENTS

[0014] As used herein certain terms are defined as follows.

[0015] An “oil-associated gene” means a nucleic acid molecule comprising at least a functional part of the open reading frame of a gene (or a homolog thereof) that either overlaps with, or is associated by linkage disequilibrium with, any one or more of the 186 genomic amplicons of SEQ ID NO:1 through SEQ ID NO:186, which contain markers having a statistically significant association with an oil trait. More particularly, oil-associated genes are found in the group consisting of:

[0016] (a) on maize chromosome 1 the genes characterized by nucleic acid sequences of SEQ ID NO: 266, 291, 340, 255, 265, 187, 322, 243, 261, 244, 200, 248, 228, 251, 319, 321, 290, 249, 263, 299, 196, 242, 279, 306, 338, and 233; a gene having DNA that overlaps, or is associated by linkage disequilibrium with, the marker amplicon defined by SEQ ID NO: 185; genes encoding proteins having an amino acid sequence selected from the group consisting of SEQ ID NO: 425, 450, 499, 414, 424, 346, 481, 402, 420, 403, 359, 407, 387, 410, 478, 480, 449, 408, 422, 458, 355, 401, 438, 465, 497, and 392; and homologs thereof selected from plants, fungi, algae and bacteria;

[0017] (b) on maize chromosome 2 the genes characterized by nucleic acid sequences of SEQ ID NO: 234, 259, 296, 285, 283, 208, 205, 282, 305, 190, 288, 339, 317, 303, 189, 220, 293, 267, 188, and 281; a gene having DNA that overlaps, or is associated by linkage disequilibrium with, the marker amplicon defined by SEQ ID NO: 180; genes encoding proteins having an amino acid sequence selected from the group consisting of SEQ ID NO:393, 418, 455, 444, 442, 367, 364, 441, 464, 349, 447, 498, 476, 462, 348, 379, 452, 426, 347, and 440; and homologs thereof selected from plants, fungi, algae and bacteria;

[0018] (c) on maize chromosome 3 the genes characterized by nucleic acid sequences of SEQ ID NO: 272, 204, 239, 270, 307, 217, 312, 310, 229, 194, 219, 225, 334, 212, 240, 202, 315, and 326; genes having DNA that overlaps, or is associated by linkage disequilibrium with, a marker amplicon defined by SEQ ID NO: 165, 169, 172, 164, 167, and 166; genes encoding proteins having an amino acid sequence selected from the group consisting of SEQ ID NO: 431, 363, 398, 429, 466, 376, 471, 469, 388, 353, 378, 384, 493, 371, 399, 361, 474, and 485; and homologs thereof selected from plants, fungi, algae and bacteria;

[0019] (d) on maize chromosome 4 the genes characterized by nucleic acid sequences of SEQ ID NO: 222, 345, 206, 195, 252, 300, 287, 298, 295, 273, 337, 238, 214, and 333; genes having DNA that overlaps, or is associated by linkage disequilibrium with, a marker amplicon defined by SEQ ID NO: 182, 184, and 176; genes encoding proteins having an amino acid sequence selected from the group consisting of SEQ ID NO: 381, 504, 365, 354, 411, 459, 446, 457, 454, 432, 496, 397, 373, and 492; and homologs thereof selected from plants, fungi, algae and bacteria;

[0020] (e) on maize chromosome 5 the genes characterized by nucleic acid sequences of SEQ ID NO: 221, 309, 211, 308, 213, 271, 241, 332, 323, 227, 250, 275, and 235; genes having DNA that overlaps, or is associated by linkage disequilibrium with, a marker amplicon defined by SEQ ID NO: 168, 174, 186, and 181; genes encoding proteins having an amino acid sequence selected from the group consisting of SEQ ID NO: 380, 468, 370, 467, 372, 430, 400, 491, 482, 386, 409, 434, and 394; and homologs thereof selected from plants, fungi, algae and bacteria;

[0021] (f) on maize chromosome 6 the genes characterized by nucleic acid sequences of SEQ ID NO: 343, 280, 247, 231, 193, 277, 237, 274, 304, 276, 331, 191, 294, 335, 344, 218, 198, 210, 316, 236, 254, 253; genes encoding proteins having an amino acid sequence selected from the group consisting of SEQ ID NO: 502, 439, 406, 390, 352, 436, 396, 433, 463, 435, 490, 350, 453, 494, 503, 377, 357, 369, 475, 395, 413, and 412; and homologs thereof selected from plants, fungi, algae and bacteria;

[0022] (g) on maize chromosome 7 the genes characterized by nucleic acid sequences of SEQ ID NO: 264, 232, 257, 278, 197, 268, 245, 256, 192, 284, 329, 209, 260, and 230; genes having DNA that overlaps, or is associated by linkage disequilibrium with, a marker amplicon defined by SEQ ID NO: 177, 163, 162, and 175; genes encoding proteins having an amino acid sequence selected from the group consisting of SEQ ID NO: 423, 391, 416, 437, 356, 427, 404, 415, 351, 443, 488, 368, 419, and 389; and homologs thereof selected from plants, fungi, algae and bacteria;

[0023] (h) on maize chromosome 8 the genes characterized by nucleic acid sequences of SEQ ID NO: 262, 302, 318, 223, 292, 224, 328, 313, 289, 269, 286, 314, 203, 301, 207 and 327; genes having DNA that overlaps, or is associated by linkage disequilibrium with, a marker amplicon defined by SEQ ID NO: 171, 179, and 170; genes encoding proteins having an amino acid sequence selected from the group consisting of SEQ ID NO: 421, 461, 477, 382, 451, 383, 487, 472, 448, 428, 445, 473, 362, 460, 366, and 486; and homologs thereof selected from plants, fungi, algae and bacteria;

[0024] (i) on maize chromosome 9 the genes characterized by nucleic acid sequences of SEQ ID NO: 226, 320, 336, 215, 341, 199, 201, and 246; genes having DNA that overlaps, or is associated by linkage disequilibrium with, a marker amplicon defined by SEQ ID NO: 178, 183, and 173; genes encoding proteins having an amino acid sequence selected from the group consisting of SEQ ID NO: 385, 479, 495, 374, 500, 358, 360, and 405; and homologs thereof selected from plants, fungi, algae and bacteria;

[0025] (j) on maize chromosome 10 the genes characterized by nucleic acid sequences of SEQ ID NO: 325, 258, 297, 324, 330, and 311; genes encoding proteins having an amino acid sequence selected from the group consisting of SEQ ID NO: 484, 417, 456, 483, 489, and 470; and homologs thereof selected from plants, fungi, algae and bacteria;

[0026] (k) genes characterized by the unmapped nucleic acid sequences of SEQ ID NO: 216 and 342; genes encoding proteins having an amino acid sequence selected from the group consisting of SEQ ID NO: 375 and 501; and homologs thereof selected from plants, fungi, algae and bacteria;

[0027] (l) homologs of maize oil-associated genes that encode a protein identified in Table 1, which have the amino acid sequences of SEQ ID NO: 505 through SEQ ID NO: 2459;

[0028] (m) nucleic acid molecules comprising oligonucleotides of at least 40 consecutive nucleic acid residues of a gene in sections (a) through 0) and having at least 60%, more preferably at least 70%, even more preferably at least 80%, and most preferably at least 90% identity with a same length fragment of said gene; and

[0029] (n) nucleic acid molecules encoding polypeptides having an amino acid sequence that has at least 80% similarity to an amino acid sequence of a protein in sections (a) through (l).

[0030] An “allele” means an alternative sequence at a particular locus; the length of an allele can be as small as 1 nucleotide base but is typically larger. Allelic sequence can be amino acid sequence or nucleic acid sequence.

[0031] A “locus” is a short sequence that is usually unique and usually found at one particular location by a point of reference, e.g., a short DNA sequence that is a gene, or part of a gene or intergenic region. A locus of this invention can be a unique PCR product. The loci of this invention are polymorphic between certain individuals.

[0032] “Genotype” means the specification of an allelic composition at one or more loci within an individual organism. In the case of diploid organisms, there are two alleles at each locus; a diploid genotype is said to be homozygous when the alleles are the same, and heterozygous when the alleles are different.

[0033] “Consensus sequence” means

[0034] (a) a constructed DNA sequence that identifies SNP and Indel polymorphisms in alleles at a locus. Consensus sequence of a polymorphic locus can be based on either strand of DNA at the locus and states the nucleotide base of either one of each SNP in the locus and the nucleotide bases of all Indels in the locus. Thus, although a consensus sequence of a polymorphic locus may not be a copy of an actual DNA sequence, a consensus sequence is useful for precisely designing primers and probes for actual polymorphisms in the locus.

[0035] (b) a conserved amino acid sequence of part or all of the proteins encoded by homogolous genes.

[0036] “Homolog” of an oil-associated gene as used herein means a gene from the same or a different organism that performs the same biological function as the oil-associated gene. An orthologous relation between two organisms is not necessarily manifest as a one-to-one correspondence between two genes, because a gene can be duplicated or deleted after organism phylogenetic separation, such as speciation. So for a given gene, there may be no ortholog or more than one ortholog. Other complicating factors include alternatively spliced transcripts from the same gene, limited gene identification, redundant copies of the same gene with different sequence lengths or corrected sequence. A local sequence alignment program, e.g., BLAST, can be used to search a database of sequences to find similar sequences, and the summary Expectation value (E-value) can be used to measure the sequence base similarity. Because query results with the best E-value for a particular organism may not necessarily be an ortholog or the only ortholog, it is necessary to use a reciprocal BLAST search to filter the hit sequences with significant E-values before calling them orthologs. The reciprocal BLAST entails search of the significant hits against a database of genes from the base organism that are similar to the query gene. A hit is a likely ortholog when the reciprocal BLAST's best hit is the query gene itself or is one of the duplicated genes of the query gene after speciation. Some skilled in the art may argue that what is called a homolog is in fact an ortholog or a paralog. Regardless, the term homolog is used herein to describe genes that are assumed to have functional similarity by inference from sequence base similarity. A detailed procedure is set forth below in Example 3.

[0037] “Phenotype” means the detectable characteristics of a cell or organism that are a manifestation of gene expression.

[0038] “Marker” means a polymorphic sequence. A “polymorphism” is a variation among individuals in sequence, particularly in DNA sequence. Useful polymorphisms include a single nucleotide polymorphisms (SNPs) and insertions or deletions in DNA sequence (Indels).

[0039] “Maize oil marker” means a marker in any one of the genomic amplicons of SEQ ID NO:1 through SEQ ID NO:186 and markers in linkage disequilibrium with a marker in said amplicons.

[0040] “Marker assay” means a method for detecting a polymorphism at a particular locus using a particular method, e.g., phenotype (such as seed color, flower color, or other visually detectable trait), restriction fragment length polymorphism (RFLP), single base extension, electrophoresis, sequence alignment, allelic specific oligonucleotide hybridization (ASO), RAPD, etc. Preferred marker assays include single base extension as disclosed in U.S. Pat. No. 6,013,431 and allelic discrimination where endonuclease activity releases a reporter dye from a hybridization probe as disclosed in U.S. Pat. No. 5,538,848, the disclosures of both of which are incorporated herein by reference.

[0041] “Linkage” is the lack of independent assortment of alleles at different loci into gametes during meiosis. For example, consider locus A with alleles “A” and “a” and locus B with alleles “B” and “b”. When a diploid formed from the union of gametes “AB” and “ab” undergoes meiosis, it can produce four types of gametes: “AB”, “Ab”, “aB” and “ab”. The null expectation is that there will be independent and equal segregation into each of the four possible genotypes, i.e., with no linkage, ¼ of the gametes will be of each genotype. Segregation of alleles into gametes at frequencies differing from h are attributed to linkage. Two loci are said to be “genetically linked” when they show this deviation from the expected equal frequency of ¼.

[0042] “Linkage disequilibrium” is defined in the context of the relative frequency of gamete types in a population of many individuals in a single generation. Again, consider locus A with alleles “A” and “a” and locus B with alleles “B” and “b,” if the frequency of allele A is p, a is p′, B is q and b is q′, then the expected frequency (with no linkage disequilibrium) of genotype AB is pq, Ab is pq′, aB is p′q and ab is p′q′. Any deviation from the expected frequency is called linkage disequilibrium. It is a nonrandom association of alleles at different loci.

[0043] “Quantitative Trait Locus (QTL)” means a locus that controls to some degree numerically representable traits that are usually continuously distributed.

[0044] “Haplotype” means the genotype for multiple loci or genetic markers in a haploid gamete. Generally, these loci or markers reside within a relatively small and defined region of a chromosome. A preferred haplotype comprises the 10 cM region or the 5 cM region or the 2 cM region surrounding an informative marker having a significant association with oil.

[0045] “Hybridizing” means the capacity of two nucleic acid molecules or fragments thereof to form anti-parallel, double-stranded nucleotide structure. The nucleic acid molecules of this invention are capable of hybridizing to other nucleic acid molecules under certain circumstances. A nucleic acid molecule is said to be the “complement” of another nucleic acid molecule if the molecules exhibit “complete complementarity,” i.e., each nucleotide in one sequence is complementary to its base pairing partner nucleotide in another sequence. Two molecules are said to be “minimally complementary” if they can hybridize to one another with sufficient stability to permit them to remain annealed to one another under at least conventional “low-stringency” conditions. Similarly, the molecules are said to be “complementary” if they can hybridize to one another with sufficient stability to permit them to remain annealed to one another under conventional “high-stringency” conditions. Nucleic acid molecules that hybridize to other nucleic acid molecules, e.g., at least under low stringency conditions are said to be “hybridizable cognates” of the other nucleic acid molecules. Conventional stringency conditions are described by Sambrook et al., Molecular Cloning, A Laboratory Manual, 2nd Ed., Cold Spring Harbor Press, Cold Spring Harbor, N.Y. (1989) and by Haymes et al., Nucleic Acid Hybridization, A Practical Approach, IRL Press, Washington, D.C. (1985), each of which is incorporated herein by reference. Departures from complete complementarity are therefore permissible, as long as such departures do not completely preclude the capacity of the molecules to form a double-stranded structure. Thus, in order for a nucleic acid molecule to serve as a primer or probe, it need only be sufficiently complementary in sequence to be able to form a stable double-stranded structure under the particular solvent and salt concentrations employed. Appropriate stringency conditions that promote DNA hybridization, for example, 6.0× sodium chloride/sodium citrate (SSC) at about 45° C., followed by a wash of 2.0×SSC at 50° C., are known to those skilled in the art or can be found in Current Protocols in Molecular Biology, John Wiley & Sons, N.Y. (1989), 6.3.1-6.3.6, incorporated herein by reference. For example, the salt concentration in the wash step can be selected from a low stringency of about 2.0×SSC at 50° C. to a high stringency of about 0.2×SSC at 50° C. In addition, the temperature in the wash step can be increased from low stringency conditions at room temperature, about 22° C., to high stringency conditions at about 65° C. Both temperature and salt may be varied, or either the temperature or the salt concentration may be held constant while the other variable is changed.

[0046] “Sequence identity” refers to the extent to which two optimally aligned polynucleotide or peptide sequences are invariant throughout a window of alignment of components, e.g., nucleotides or amino acids. An “identity fraction” for aligned segments of a test sequence and a reference sequence is the number of identical components that are shared by the two aligned sequences divided by the total number of components in reference sequence segment, i.e., the entire reference sequence or a smaller defined part of the reference sequence. “Percent identity” is the identity fraction times 100. Optimal alignment of sequences for aligning a comparison window are well known to those skilled in the art and may be conducted by tools such as the local homology algorithm of Smith and Waterman, the homology alignment algorithm of Needleman and Wunsch, the search for similarity method of Pearson and Lipman, and preferably by computerized implementations of these algorithms such as GAP, BESTFIT, FASTA, and TFASTA available as part of the GCG® Wisconsin Package® (Accelrys Inc. Burlington, Mass.). Polynucleotides of the present invention that are variants of the polynucleotides provided herein will generally demonstrate significant identity with the polynucleotides provided herein. Of particular interest are polynucleotide homologs having at least about 70% sequence identity, at least about 80% sequence identity, at least about 90% sequence identity, and more preferably even greater, such as 98% or 99% sequence identity with polynucleotide sequences described herein.

[0047] “Genetic transformation” means a process of introducing a DNA construct (e.g., a vector or expression cassette) into a cell or protoplast in which that exogenous DNA is incorporated into a chromosome or is capable of autonomous replication.

[0048] “Exogenous gene” means a gene or partial gene that is not normally present in a given host genome in the exogenous gene's present form. In this respect, the gene itself may be native to the host genome; however, the exogenous gene will comprise the native gene altered by the addition or deletion of one or more different regulatory elements.

[0049] “Expression” means the combination of intracellular processes, including transcription and translation undergone by a coding DNA molecule such as a structural gene to produce a polypeptide.

[0050] “Progeny” means any subsequent generation, including the seeds and plants therefrom, that is derived from a particular parental plant or set of parental plants.

[0051] “Promoter” means a recognition site on a DNA sequence or group of DNA sequences that provides an expression control element for a structural gene and to which RNA polymerase specifically binds and initiates RNA synthesis (transcription) of that gene.

[0052] “R₀ transgenic plant” means a plant that has been directly transformed with a selected DNA or has been regenerated from a cell or cell cluster that has been transformed with a selected DNA.

[0053] “Regeneration” means the process of growing a plant from a plant cell (e.g., plant protoplast, callus or explant).

[0054] “DNA construct” means a chimeric DNA molecule that is designed for introduction into a host genome by genetic transformation. Preferred DNA constructs will comprise all of the genetic elements necessary to direct the expression of one or more exogenous genes. In particular embodiments of the instant invention, it may be desirable to introduce a DNA construct into a host cell in the form of an expression cassette.

[0055] “Transformed cell” means a cell the DNA complement of which has been altered by the introduction of an exogenous DNA molecule into that cell.

[0056] “Transgene” means a segment of DNA that has been incorporated into a host genome or is capable of autonomous replication in a host cell and is capable of causing the expression of one or more cellular products. Exemplary transgenes will provide the host cell, or plants regenerated therefrom, with a novel phenotype relative to the corresponding non-transformed cell or plant. Transgenes may be directly introduced into a plant by genetic transformation or may be inherited from a plant of any previous generation that was transformed with the DNA segment.

[0057] “Transgenic plant” means a plant or progeny plant of any subsequent generation derived therefrom, wherein the DNA of the plant or progeny thereof contains an introduced exogenous DNA segment not originally present in a non-transgenic plant of the same strain. The transgenic plant may additionally contain sequences that are native to the plant being transformed, but wherein the “exogenous” gene has been altered in order to alter the level or pattern of expression of the gene.

[0058] “Transit peptide” means a polypeptide sequence that is capable of directing a polypeptide to a particular organelle or other location within a cell.

[0059] “Vector” means a DNA molecule capable of replication in a host cell or to which another DNA segment can be operatively linked so as to bring about replication of the attached segment. A plasmid is an exemplary vector.

[0060] “Purified” refers to a nucleic acid molecule or polypeptide separated from substantially all other molecules normally associated with it in its native state. More preferably, a substantially purified molecule is the predominant species present in a preparation. A substantially purified molecule may be greater than 60% free or 75% free or 90% free or 95% free from the other molecules (exclusive of solvent) present in the natural mixture. The terms “isolated and purified” and “substantially purified” are not intended to encompass molecules present in their native state.

[0061] As used herein “yield” means the production of a crop, e.g., shelled corn kernels or soybean or cotton fiber, per unit of production area, e.g., in bushels per acre or metric tons per hectare, often reported on a moisture adjusted basis, e.g., corn is typically reported at 15.5% moisture. Moreover a bushel of corn is defined by law in the State of Iowa as 56 pounds by weight, a useful conversion factor for corn yield is 100 bushels per acre is equivalent to 6.272 metric tons per hectare. Other measurements for yield are in common practice.

[0062] The molecules and organisms of the invention may also be “recombinant,” which describes (a) nucleic acid molecules that are constructed or modified outside of cells and that can replicate or function in a living cell, (b) molecules that result from the transcription, replication or translation of recombinant nucleic acid molecules, or (c) organisms that contain recombinant nucleic acid molecules or are modified using recombinant nucleic acid molecules.

[0063] As used herein a “transgenic” organism, e.g., plant or seed, is one whose genome has been altered by the incorporation of exogenous genetic material or additional copies of native genetic material, e.g., by transformation or recombination of the organism or an ancestor organism. Transgenic plants include progeny plants of an original plant derived from a transformation process including progeny of breeding transgenic plants with wild type plants or other transgenic plants Crop plants of interest in the present invention include, but are not limited to, maize, soybean, cotton, wheat, sorghum, canola (oilseed rape), sunflower, safflower and flax.

[0064] “Enhanced protein activity” in a recombinant cell or organism is determined by reference to a wild-type plant or to the non-recombinant ancestor plant line or, in the case where the ancestor is a recombinant plant, to the parental line prior to the most recent recombinant insertion intended to promote the specific enhanced protein activity and can be determined by direct or indirect measurement. Direct measurement of protein activity might include an analytical assay for the protein, per se, or enzymatic product of protein activity. Indirect assay might include measurement of a property affected by the protein. Enhanced protein activity can be achieved by linking a constitutive promoter to the gene encoding the protein. Reduced protein activity can be achieved by a variety of mechanisms including anti-sense, co-suppression, double stranded RNA (dsRNA), mutation or knockout. Anti-sense, co-suppression and dsRNA mechanisms will reduce the level of protein expressed and the activity will be reduced as compared to wild-type expression levels. A mutation in the gene coding for a protein may not decrease the protein expression but instead interfere with the protein's function to cause reduced protein activity. A knockout can be achieved by homologous recombination with less than the whole gene.

[0065] As used herein “gene suppression” means any of the well-known methods for suppressing expression of protein from a gene including sense suppression, anti-sense suppression and RNAi suppression. In suppressing oil-associated genes to provide plants with reduced levels of seed oil, anti-sense and RNAi gene suppression methods are preferred. More particularly, for a description of anti-sense regulation of gene expression in plant cells see U.S. Pat. No. 5,107,065 and for a description of RNAi gene suppression in plants by transcription of a dsRNA see U.S. Pat. No. 6,506,559, U.S. Patent Application Publication No. 2002/0168707 A1, and U.S. patent application Ser. No. 09/423,143 (see WO 98/53083), Ser. No. 09/127,735 (see WO 99/53050) and Ser. No. 09/084,942 (see WO 99/61631), all of which are incorporated herein by reference. Suppression of an oil-associated gene by RNAi can be achieved using a recombinant DNA construct having a promoter operably linked to a DNA element comprising a sense and anti-sense element of a segment of genomic DNA of the oil-associated gene, e.g., a segment of at least about 23 nucleotides, more preferably about 50 to 200 nucleotides where the sense and anti-sense DNA components can be directly linked or joined by an intron or artificial DNA segment that can form a loop when the transcribed RNA hybridizes to form a hairpin structure. For example, genomic DNA from a polymorphic locus of SEQ ID NO:1 through SEQ ID NO:186 can be used in a recombinant construct for suppression of a cognate oil-associated gene by RNAi suppression.

[0066] Characteristics of Oil-Associated Genes

[0067] This invention provides nucleic acid molecules comprising DNA sequence representing oil-associated genes having a nucleic acid sequence of SEQ ID NO:187 through SEQ ID NO:345 or fragments of such oil-associated genes such as substantial parts of oil-associated genes providing the protein coding sequence part of the oil-associated gene. The oil-associated genes of this invention have been identified by marker trait association.

[0068] Homologous oil-associated genes have been identified in other plants and in other organisms such as fungi, algae and bacteria using the nucleic acid sequence of a known oil-associated gene or the amino acid sequence of a protein encoded by an oil-associated gene in any of a variety of search algorithms, e.g., the BLAST search algorithm, in public or proprietary DNA and protein databases. Existence of a gene is inferred if significant sequence similarity extends over the sequence of the target gene. Because homology-based methods may overlook genes unique to the source organism, for which homologous nucleic acid molecules have not yet been identified in databases, gene prediction programs are also used. Gene prediction programs generally use “signals” in the sequence, such as splice sites or “content” statistics, such as codon bias, to predict gene structures (Stormo, Genome Research 10: 394-397, 2000). Identified homologs of oil-associated genes are listed in Table 1.

[0069] With respect to nucleotide sequences, degeneracy of the genetic code provides the possibility to substitute at least one base of the base sequence of a gene with a different base without causing the amino acid sequence of the polypeptide produced from the gene to be changed. Hence, the DNA of the present invention may also have any codon changed in a sequence of SEQ ID NO: 1 through SEQ ID NO: 345 by substitution in accordance with degeneracy of genetic code. See U.S. Pat. No. 5,500,365, incorporated herein by reference.

[0070] More particularly, the homologous oil-associated genes can be characterized by reference to an artificial consensus sequence of conserved amino acids determined from an alignment of protein sequence encoded by such homologs.

[0071] Characteristics of Maize Oil Markers

[0072] The maize loci of this invention comprise a DNA sequence that comprises at least 20 consecutive nucleotides and includes or is adjacent to one or more polymorphisms identified in Table 1. Such maize loci have a nucleic acid sequence having at least 90% sequence identity or at least 95% or for some alleles at least 98% and in many cases at least 99% sequence identity, to the sequence of the same number of nucleotides in either strand of a segment of maize DNA that includes or is adjacent to the polymorphism. The nucleotide sequence of one strand of such a segment of maize DNA may be found in a polymorphic locus with a sequence in the group consisting of SEQ ID NO:1 through SEQ ID NO:186. It is understood by the very nature of polymorphisms that for at least some alleles there will be no identity to the polymorphism, per se. Thus, sequence identity can be determined for a sequence that is exclusive of the polymorphism sequence. The polymorphisms in each locus are identified more particularly in Table 1.

[0073] For many genotyping applications it is useful to employ as markers polymorphisms from more than one locus. Thus, aspects of the invention use a collection of different loci. The number of loci in such a collection can vary but will be a finite number, e.g., as few as 2 or 5 or 10 or 25 loci or more, for instance up to 40 or 75 or 100 or more loci.

[0074] Another aspect of the invention provides nucleic acid molecules that are capable of hybridizing to the polymorphic maize loci of this invention, e.g., PCR primers and hybridization probes. In certain embodiments of the invention, e.g., which provide PCR primers, such molecules comprise at least 15 nucleotide bases. Molecules useful as primers can hybridize under high stringency conditions to one of the strands of a segment of DNA in a polymorphic locus of this invention. Primers for amplifying DNA are provided in pairs, i.e., a forward primer and a reverse primer. One primer will be complementary to one strand of DNA in the locus and the other primer will be complementary to the other strand of DNA in the locus, i.e., the sequence of a primer is at least 90% or at least 95% identical to a sequence of the same number of nucleotides in one of the strands. It is understood that such primers can hybridize to a sequence in the locus that is distant from the polymorphism, e.g., at least 5, 10, 20, 50 or up to about 100 nucleotide bases away from the polymorphism. Design of a primer of this invention will depend on factors well known in the art, e.g., avoidance of repetitive sequence.

[0075] Another aspect of the nucleic acid molecules of this invention are hybridization probes for polymorphism assays. In one aspect of the invention such probes are oligonucleotides comprising at least 12 nucleotide bases and a detectable label. The purpose of such a molecule is to hybridize, e.g., under high stringency conditions, to one strand of DNA in a segment of nucleotide bases that includes or is adjacent to the polymorphism of interest in an amplified part of a polymorphic locus. Such oligonucleotides are at least 90% or at least 95% identical to the sequence of a segment of the same number of nucleotides in one strand of maize DNA in a polymorphic locus. The detectable label can be a radioactive element or a dye. In preferred aspects of the invention, the hybridization probe further comprises a fluorescent label and a quencher, e.g., for use in hybridization probe assays of the type known as Taqman assays, available from Applied Biosystems of Foster City, Calif.

[0076] For assays where the molecule is designed to hybridize adjacent to a polymorphism that is detected by single base extension, e.g., of a labeled dideoxynucleotide, such molecules can comprise at least 15 or at least 16 or 17 nucleotide bases in a sequence that is at least 90% or at least 95% identical to a sequence of the same number of consecutive nucleotides in either strand of a segment of polymorphic maize DNA. Oligonucleotides for single base extension assays are available from Orchid Bioystems.

[0077] Such primer and probe molecules are generally provided in groups of two primers and one or more probes for use in genotyping assays. Moreover, it is often desirable to conduct a plurality of genotyping assays for a plurality of polymorphisms. Thus, this invention also provides collections of nucleic acid molecules, e.g., in sets that characterize a plurality of polymorphisms.

[0078] Characteristics of Protein and Polypeptide Molecules

[0079] The nucleic acid molecules of this invention encode certain proteins or smaller polypeptide molecules including those having an amino acid sequence of SEQ ID NO: 346 through SEQ ID NO: 504. Homologs of the polypeptides of the present invention may be identified by comparison of the amino acid sequence of the polypeptide to amino acid sequences of polypeptides from the same or different plant sources, e.g., manually or by using known homology-based search algorithms such as those commonly known and referred to as BLAST, FASTA, and Smith-Waterman.

[0080] A further aspect of the invention comprises functional homolog proteins that differ in one or more amino acids from those of a polypeptide provided herein as the result of one or more of the well-known conservative amino acid substitutions, e.g., valine is a conservative substitute for alanine and threonine is a conservative substitute for serine. Conservative substitutions for an amino acid within the native polypeptide sequence can be selected from other members of a class to which the naturally occurring amino acid belongs. Representative amino acids within these various classes include, but are not limited to, (1) acidic (negatively charged) amino acids such as aspartic acid and glutamic acid; (2) basic (positively charged) amino acids such as arginine, histidine, and lysine; (3) neutral polar amino acids such as glycine, serine, threonine, cysteine, tyrosine, asparagine, and glutamine; and (4) neutral nonpolar (hydrophobic) amino acids such as alanine, leucine, isoleucine, valine, proline, phenylalanine, tryptophan, and methionine. Conserved substitutes for an amino acid within a native amino acid sequence can be selected from other members of the group to which the naturally occurring amino acid belongs. For example, a group of amino acids having aliphatic side chains is glycine, alanine, valine, leucine, and isoleucine; a group of amino acids having aliphatic-hydroxyl side chains is serine and threonine; a group of amino acids having amide-containing side chains is asparagine and glutamine; a group of amino acids having aromatic side chains is phenylalanine, tyrosine, and tryptophan; a group of amino acids having basic side chains is lysine, arginine, and histidine; and a group of amino acids having sulfur-containing side chains is cysteine and methionine. Naturally conservative amino acids substitution groups are: valine-leucine, valine-isoleucine, phenylalanine-tyrosine, lysine-arginine, alanine-valine, aspartic acid-glutamic acid, and asparagine-glutamine. A further aspect of the invention comprises polypeptides that differ in one or more amino acids from those of a described protein sequence as the result of deletion or insertion of one or more amino acids in a native sequence.

[0081] Recombinant DNA Constructs for Plant Transformation

[0082] The present invention contemplates the use of polynucleotides that encode a protein effective for imparting altered oil levels in plants. Such polynucleotides are assembled in recombinant DNA constructs using methods known to those of ordinary skill in the art. A useful technology for building DNA constructs and vectors for transformation is the GATEWAY™ cloning technology (available from Invitrogen Life Technologies, Carlsbad, Calif.), which uses the site-specific recombinase LR cloning reaction of the Integrase/att system from bacteriophage lambda vector construction instead of restriction endonucleases and ligases. The LR cloning reaction is disclosed in U.S. Pat. Nos. 5,888,732 and 6,277,608, U.S. Patent Application Publications 2001283529, 2001282319 and 20020007051, all of which are incorporated herein by reference. The GATEWAY™ Cloning Technology Instruction Manual, which is supplied by Invitrogen, also provides concise directions for routine cloning of any desired DNA into a vector comprising operable plant expression elements.

[0083] Transgenic DNA constructs used for transforming plant cells will comprise the heterologous DNA that one desires to introduced into and a promoter to express the heterologous DNA in the host maize cells. As is well known in the art, such constructs typically also comprise a promoter and other regulatory elements, 3′ untranslated regions (such as polyadenylation sites), transit or signal peptides and marker genes elements as desired. For instance, see U.S. Pat. Nos. 5,858,642 and 5,322,938, which disclose versions of the constitutive promoter derived from cauliflower mosaic virus (CaMV35S), U.S. Pat. No. 6,437,217, which discloses a maize RS81 promoter, U.S. Pat. No. 5,641,876, which discloses a rice actin promoter, U.S. Pat. No. 6,426,446, which discloses a maize RS324 promoter, U.S. Pat. No. 6,429,362, which discloses a maize PR-1 promoter, U.S. Pat. No. 6,232,526, which discloses a maize A3 promoter, U.S. Pat. No. 6,177,611, which discloses constitutive maize promoters, U.S. Pat. No. 6,433,252, which discloses a maize L3 oleosin promoter, U.S. Pat. No. 6,429,357, which discloses a rice actin 2 promoter and intron, U.S. Pat. No. 5,837,848, which discloses a root specific promoter, U.S. Pat. No. 6,084,089, which discloses cold inducible promoters, U.S. Pat. No. 6,294,714, which discloses light inducible promoters, U.S. Pat. No. 6,140,078, which discloses salt inducible promoters, U.S. Pat. No. 6,252,138, which discloses pathogen inducible promoters, U.S. Pat. No. 6,175,060, which discloses phosphorus deficiency inducible promoters, U.S. Patent Application Publication 2002/0192813A1, which discloses 5′, 3′ and intron elements useful in the design of effective plant expression vectors, U.S. patent application Ser. No. 09/078,972, which discloses a coixin promoter, and U.S. patent application Ser. No. 09/757,089, which discloses a maize chloroplast aldolase promoter, all of which are incorporated herein by reference.

[0084] In many aspects of the invention it is preferred that the promoter element in the DNA construct should be seed or kernel-tissue specific. Such promoters can be identified and isolated by those skilled in the art from the regulatory region of plant genes that are over expressed in seed tissue, e.g., embryo or endosperm. For example, specific-seed tissue-specific promoters for use in this invention include an L3 oleosin promoter as disclosed in U.S. Pat. No. 6,433,252, a gamma coixin promoter as disclosed in U.S. patent application Ser. No. 09/078,972, and emb5 promoter as disclosed in U.S. provisional application Serial No. 60/434,242, all of which are incorporated herein by reference.

[0085] In general, it is preferred to introduce heterologous DNA randomly, i.e., at a non-specific location, in the plant genome. In special cases it may be useful to target heterologous DNA insertion in order to achieve site-specific integration, e.g., to replace an existing gene in the genome. In some other cases it may be useful to target a heterologous DNA integration into the genome at a predetermined site from which it is known that gene expression occurs. Several site-specific recombination systems exist that are known to function in plants and include cre-lox as disclosed in U.S. Pat. No. 4,959,317 and FLP-FRT as disclosed in U.S. Pat. No. 5,527,695, both incorporated herein by reference.

[0086] Constructs and vectors may also include a transit peptide for targeting of a gene target to a plant organelle, particularly to a chloroplast, leucoplast or other plastid organelle. For a description of the use of a chloroplast transit peptide see U.S. Pat. No. 5,188,642, incorporated herein by reference.

[0087] In practice, DNA is introduced into only a small percentage of target cells in any one experiment. Selectable marker genes are used to provide an efficient system for identification of those cells that are stably transformed by receiving and integrating a transgenic DNA construct into their genomes. Preferred selectable marker genes confer resistance to a selective agent, such as an antibiotic or herbicide. Potentially transformed cells are exposed to the selective agent. In the population of surviving cells will be those cells where, generally, the resistance-conferring gene has been integrated and expressed at sufficient levels to permit cell survival. Cells may be tested further to confirm stable integration of the exogenous DNA. Useful selectable marker genes include those conferring resistance to antibiotics such as kanamycin (nptII), hygromycin B (aph IV) and gentamycin (aac3 and aacC4) or resistance to herbicides such as glufosinate (bar or pat) and glyphosate (EPSPS). Examples of such selectable marker genes are illustrated in U.S. Pat. Nos. 5,550,318; 5,633,435; 5,780,708 and 6,118,047, all of which are incorporated herein by reference. Screenable markers that provide an ability to visually identify transformants can also be employed, e.g., a gene expressing a colored or fluorescent protein such as a luciferase or green fluorescent protein (GFP) or a gene expressing a beta-glucuronidase or uidA gene (GUS) for which various chromogenic substrates are known.

[0088] Exogenous Oil-Associated Genes for Modification of Plant Phenotypes

[0089] A particularly important advance of the present invention is that it provides DNA sequences useful for producing desirable oil-related phenotypes in plants, preferably in crop plants such as soybean, cotton, canola, sunflower, safflower, flax and most preferably in maize.

[0090] The choice of a selected DNA sequence for expression in a plant host cell in accordance with the invention will depend on the purpose of gene expression, e.g., expression of a native gene or homolog by a constitutive promoter, over expression of a native gene or homolog, suppression of a native gene, or altered tissue- or stage-specific expression of a native gene or homolog by a tissue- or stage-specific promoter.

[0091] In certain embodiments of the invention, transformation of a recipient cell may be carried out with more than one exogenous DNA coding region. As used herein, an “exogenous coding region” or “selected coding region” is a coding region not normally found in the host genome in an identical context. By this, it is meant that the coding region may be isolated from a different species than that of the host genome, or alternatively, isolated from the host genome, but it is operably linked to one or more regulatory regions that differ from those found in the unaltered, native gene. Two or more exogenous coding regions also can be supplied in a single transformation event using either distinct transgene-encoding vectors, or using a single vector incorporating two or more coding sequences.

[0092] Enhancement of an oil-related trait can also be effected by suppression of one or more genes that express proteins that divert oil producing materials into competing products or that degrade oil products. Site-directed inactivation of a gene, while possible, is typically difficult to achieve. Other more effective methods of gene suppression include the use anti-sense RNA, co-suppression, interfering RNA, processing defective RNA, transposon tagging, backcrossing or homologous recombination. Post transcriptional gene suppression by RNA interference is a superior and preferred method of gene suppression. In a preferred embodiment, gene suppression may complement over expression of an oil-associated gene.

[0093] Transformation Methods and Transgenic Plants

[0094] Methods and compositions for transforming plants by introducing a transgenic DNA construct into a plant genome in the practice of this invention can include any of the well-known and demonstrated methods. Preferred methods of plant transformation are microprojectile bombardment as illustrated in U.S. Pat. Nos. 5,015,580; 5,550,318; 5,538,880; 6,160,208: 6,194,636 and 6,399,861 and Agrobacterium-mediated transformation as illustrated in U.S. Pat. Nos. 5,824,877; 5,591,616; 5,981,840 and 6,384,301, all of which are incorporated herein by reference. See also U.S. application Ser. No. 09/823,676, incorporated herein by reference, for a description of vectors, transformation methods, and production of transformed Arabidopsis thaliana plants where genes in a recombinant DNA construct are constitutively expressed by a CaMV35S promoter.

[0095] Transformation methods of this invention to provide plants with enhanced oil traits are preferably practiced in tissue culture on media and in a controlled environment. “Media” refers to the numerous nutrient mixtures that are used to grow cells in vitro, that is, outside of the intact living organism. Recipient cell targets include, but are not limited to, meristem cells, callus, immature embryos and gametic cells such as microspores, pollen, sperm and egg cells. It is contemplated that any cell from which a fertile plant may be regenerated is useful as a recipient cell. Callus may be initiated from tissue sources including, but not limited to, immature embryos, seedling apical meristems, microspores and the like. Those cells that are capable of proliferating as callus also are recipient cells for genetic transformation. Practical transformation methods and materials for making transgenic plants of this invention, e.g., various media and recipient target cells, transformation of immature embryos and subsequent regeneration of fertile transgenic plants are disclosed in U.S. Pat. No. 6,194,636 and U.S. patent application Ser. No. 09/757,089, which are incorporated herein by reference.

[0096] Regeneration and Seed Production

[0097] Cells that survive the exposure to the selective agent, or cells that have been scored positive in a screening assay, may be cultured in media that supports regeneration of plants. Such media is well-known to one of skill in the art.

[0098] The transformed cells, identified by selection or screening and cultured in an appropriate medium that supports regeneration, will then be allowed to mature into plants. Developing plantlets are transferred to soil-less plant growth mix, and hardened off, e.g., in an environmentally controlled chamber at about 85% relative humidity, 600 ppm CO₂, and 25-250 microeinsteins m⁻² s⁻¹ of light, prior to transfer to a greenhouse or growth chamber for maturation. Plants are preferably matured either in a growth chamber or greenhouse. Plants are regenerated from about 6 wk to 10 months after a transformant is identified, depending on the initial tissue. During regeneration, cells are grown on solid media in tissue culture vessels. Regenerating plants are preferably grown at about 19° C. to 28° C. After the regenerating plants have reached the stage of shoot and root development, they may be transferred to a greenhouse-for further growth and testing. Plants may be pollinated using conventional plant breeding methods known-to those of skill in the art and seed produced.

[0099] Progeny may be recovered from transformed plants and tested for expression of the exogenous expressible gene. The transgenic seeds of this invention can be harvested from fertile transgenic plants and be used to grow progeny generations of transformed plants of this invention including hybrid plants; said progeny generations will contain the DNA construct expressing an oil-associated gene, which provides the benefits of enhanced oil production or storage

[0100] Seeds of R0 transformed plants may occasionally require embryo rescue due to cessation of seed development and premature senescence of plants. To rescue developing embryos, they are excised from surface-disinfected seeds 10-20 days post-pollination and cultured. An embodiment of media used for culture at this stage comprises MS salts, 2% sucrose, and 5.5 g/L agarose. In embryo rescue, large embryos (defined as greater than 3 mm in length) are germinated directly on an appropriate media. Embryos smaller than that may be cultured for 1 wk on media containing the above ingredients along with 10⁻⁵M abscisic acid and then transferred to growth regulator-free medium for germination.

[0101] Characterization of Transgenic Plants for Presence of Exogenous DNA

[0102] To confirm the presence of the exogenous DNA in regenerating plants, a variety of assays may be performed. Such assays include, for example, “molecular biological” assays, such as Southern and Northern blotting and PCR; “biochemical” assays, such as detecting the presence of RNA, e.g., double-stranded RNA, or a protein product, e.g., by immunological means (ELISAs and Western blots) or by enzymatic function; plant part assays, such as leaf or root assays; and also, by analyzing the phenotype of the whole regenerated plant. Genomic DNA may be isolated from callus cell lines or any plant parts to determine the presence of the exogenous gene through the use of techniques well known to those skilled in the art.

[0103] The presence of DNA elements introduced through the methods of this invention may be determined by polymerase chain reaction (PCR). Using this technique, discreet fragments of DNA are amplified and detected by gel electrophoresis. This type of analysis permits one to determine whether a gene is present in a stable transformant, but it does not necessarily prove integration of the introduced gene into the host cell genome. Typically, DNA has been integrated into the genome of all transformants that demonstrate the presence of the gene through PCR analysis. In addition, it is not possible using PCR techniques to determine whether transformants have exogenous genes introduced into different sites in the genome, i.e., whether transformants are of independent origin. Using PCR techniques, it is possible to clone fragments of the host genomic DNA adjacent to an introduced gene.

[0104] Positive proof of DNA integration into the host genome and the independent identities of transformants may be determined using the technique of Southern hybridization. Using this technique, specific DNA sequences that were introduced into the host genome and flanking host DNA sequences can be identified. Hence the Southern hybridization pattern of a given transformant serves as an identifying characteristic of that transformant. In addition, it is possible through Southern hybridization to demonstrate the presence of introduced genes in high molecular weight DNA, i.e., confirm that the introduced gene has been integrated into the host cell genome. The technique of Southern hybridization provides information that can be obtained using PCR, e.g., the presence of a gene, but also demonstrates integration into the genome and characterizes each individual transformant. It is contemplated that using the techniques of dot or slot blot hybridization, which are modifications of Southern hybridization techniques, one could obtain the same information that is derived from PCR, e.g., the presence of a gene.

[0105] Both PCR and Southern hybridization techniques can be used to demonstrate transmission of a transgene to progeny. In most instances the characteristic Southern hybridization pattern for a given transformant will segregate in progeny as one or more Mendelian genes, indicating stable inheritance of the transgene.

[0106] Further information about the nature of the RNA product may be obtained by Northern blotting. This technique will demonstrate the presence of an RNA species and give information about the integrity of that RNA. The presence or absence of an RNA species also can be determined using dot or slot blot Northern hybridizations. These techniques are modifications of Northern blotting and will only demonstrate the presence or absence of an RNA species. It is further contemplated that TAQMAN® technology (Applied Biosystems, Foster City, Calif.) may be used to quantitate both DNA and RNA in a transgenic cell.

[0107] Although Southern blotting and PCR may be used to detect the gene(s) in question, they do not provide information as to whether the gene is being expressed. Expression may be evaluated by specifically identifying the protein products of the introduced genes or evaluating the phenotypic changes brought about by their expression. The unique structures of individual proteins offer opportunities for use of specific antibodies to detect their presence in formats such as an ELISA assay. Combinations of approaches may be employed with even greater specificity such as Western blotting in which antibodies are used to locate individual gene products that have been separated by electrophoretic techniques. Additional techniques may be employed to absolutely confirm the identity of the product of interest such as evaluation by amino acid sequencing following purification.

[0108] Event-Specific Transgene Assays

[0109] Southern blotting, PCR and RT-PCR techniques can be used to identify the presence or absence of a given transgene but, depending upon experimental design, may not specifically and uniquely identify identical or related transgene constructs located at different insertion points within the recipient genome. To more precisely characterize the presence of transgenic material in a transformed plant, one skilled in the art could identify the point of insertion of the transgene and, using the sequence of the recipient genome flanking the transgene, develop an assay that specifically and uniquely identifies a particular insertion event. Many methods can be used to determine the point of insertion such as, but not limited to, Genome Walker™ technology (CLONTECH, Palo Alto, Calif.), Vectorette™ technology (Sigma, St. Louis, Mo.), restriction site oligonucleotide PCR, uneven PCR, and generation of genomic DNA clones containing the transgene of interest in a vector such as, but not limited to, lambda phage.

[0110] Once the sequence of the genomic DNA directly adjacent to the transgenic insert on either or both sides has been determined, one skilled in the art can develop an assay to specifically and uniquely identify the insertion event. For example, two oligonucleotide primers can be designed, one wholly contained within the transgene and one wholly contained within the flanking sequence, that can be used together with the PCR technique to generate a PCR product unique to the inserted transgene. In one embodiment, the two oligonucleotide primers for use in PCR could be designed such that one primer is complementary to sequences in both the transgene and adjacent flanking sequence such that the primer spans the junction of the insertion site whereas the second primer could be homologous to sequences contained wholly within the transgene. In another embodiment, the two oligonucleotide primers for use in PCR could be designed such that one primer is complementary to sequences in both the transgene and adjacent flanking sequence such that the primer spans the junction of the insertion site whereas the second primer could be homologous to sequences contained wholly within the genomic sequence adjacent to the insertion site. Confirmation of the PCR reaction may be monitored by, but not limited to, size analysis on gel electrophoresis, sequence analysis, hybridization of the PCR product to a specific radiolabeled DNA or RNA probe or to a molecular beacon, or use of the primers in conjugation with a TAQMAN™ probe and technology (Applied Biosystems, Foster City, Calif.)

[0111] Site-Specific Integration or Excision of Transgenes

[0112] It is specifically contemplated by the inventors that one could employ techniques for the site-specific integration or excision of transformation constructs prepared in accordance with the instant invention. An advantage of site-specific integration or excision is that it can be used to overcome problems associated with conventional transformation techniques, in which transformation constructs typically randomly integrate into a host genome and multiple copies of a construct may integrate. Site-specific integration can be achieved in plants by means of homologous recombination as disclosed, for example, in U.S. Pat. Nos. 5,527,695 and 5,658,772, incorporated herein by reference.

[0113] Deletion of Sequences Located Within the Transgenic Insert

[0114] During the transformation process it is often necessary to include ancillary sequences, such as selectable marker or reporter genes, for tracking the presence or absence of a desired trait gene transformed into the plant on the DNA construct. Such ancillary sequences often do not contribute to the desired trait or characteristic conferred by the phenotypic trait gene. Homologous recombination is a method by which introduced sequences may be selectively deleted in transgenic plants.

[0115] Deletion of sequences by homologous recombination relies upon directly repeated DNA sequences positioned about the region to be excised so that the repeated DNA sequences direct excision utilizing native cellular recombination mechanisms. The first fertile transgenic plants are crossed to produce either hybrid or inbred progeny plants, and from those progeny plants, one or more second fertile transgenic plants are selected that contain a second DNA sequence that has been altered by recombination, preferably resulting in the deletion of the ancillary sequence. The first fertile plant can be either hemizygous or homozygous for the DNA sequence containing the directly repeated DNA that will drive the recombination event as disclosed in U.S. application Ser. No. 09/521,557, incorporated herein by reference.

[0116] Detecting Polymorphisms

[0117] Polymorphisms in DNA sequences can be detected by a variety of effective methods well known in the art including those methods disclosed in U.S. Pat. Nos. 5,468,613 and 5,217,863 by hybridization to allele-specific oligonucleotides; in U.S. Pat. Nos. 5,468,613 and 5,800,944 by probe ligation; in U.S. Pat. No. 5,616,464-by probe linking; and in U.S. Pat. Nos. 6,004,744; 6,013,431; 5,595,890; 5,762,876; and 5,945,283 by labeled base extension, all of which are incorporated herein by reference.

[0118] In another preferred method for detecting polymorphisms, SNPs and Indels can be detected by methods disclosed in U.S. Pat. Nos. 5,210,015; 5,876,930; and 6,030,787 in which an oligonucleotide probe having a 5′ fluorescent reporter dye and a 3′ quencher dye covalently linked to the 5′ and 3′ ends of the probe. When the probe is intact, the proximity of the reporter dye to the quencher dye results in the suppression of the reporter fluorescence, e.g., by Forster-type energy transfer. A PCR reaction is designed such that forward and reverse primers hybridize to specific sequences of the target DNA flanking a polymorphism. The hybridization probe hybridizes to polymorphism-containing sequence within the amplified PCR product. In the subsequent PCR cycle, DNA polymerase with 5′→3′ exonuclease activity cleaves the probe and separates the reporter dye from the quencher dye resulting in increased fluorescence of the reporter. A useful assay is available from Applied Biosystems as the Taqman® allele discrimination assay, which employs four synthetic oligonucleotides in a single reaction that concurrently amplifies the maize genomic DNA, discriminates between the alleles present, and directly provides a signal for discrimination and detection. Two of the four oligonucleotides serve as PCR primers and generate a PCR product encompassing the polymorphism to be detected. Two others are allele-specific fluorescence-resonance-energy-transfer (FRET) probes. FRET probes incorporate a fluorophore and a quencher molecule in close proximity so that the fluorescence of the fluorophore is quenched. The signal from a FRET probe is generated by degradation of the FRET oligonucleotide, so that the fluorophore is released from proximity to the quencher, and is thus able to emit light when excited at an appropriate wavelength. In the assay, two FRET probes bearing different fluorescent reporter dyes are used, where a unique dye is incorporated into an oligonucleotide that can anneal with high specificity to only one of the two alleles. Useful reporter dyes include 6-carboxy-4,7,2′,7′-tetrachlorofluorecein (TET), VIC (a dye from Applied Biosystems, Foster City, Calif.), and 6-carboxyfluorescein phosphoramidite (FAM). A useful quencher is 6-carboxy-N,N,N′N′-tetramethylrhodamine (TAMRA). Additionally, the 3′ end of each FRET probe is chemically blocked so that it cannot act as a PCR primer. During the assay, maize genomic DNA is added to a buffer containing the two PCR primers and two FRET probes. Also present is a third fluorophore used as a passive reference, e.g., rhodamine X (ROX), to aid in later normalization of the relevant fluorescence values (correcting for volumetric errors in reaction assembly). Amplification of the genomic DNA is initiated. During each cycle of the PCR, the FRET probes anneal in an allele-specific manner to the template DNA molecules. Annealed (but not non-annealed) FRET probes are degraded by TAQ DNA polymerase as the enzyme encounters the 5′ end of the annealed probe, thus releasing the fluorophore from proximity to its quencher. Following the PCR reaction, the fluorescence of each of the two fluorescers, as well as that of the passive reference, is determined fluorometrically. The normalized intensity of fluorescence for each of the two dyes will be proportional to the amounts of each allele initially present in the sample, and thus the genotype of the sample can be inferred.

[0119] To design primers and probes for the assay, the locus sequence is first masked to prevent design of any of the three primers to sites that match known maize repetitive elements (e.g., transposons) or are of very low sequence complexity (di- or tri-nucleotide repeat sequences). Design of primers to such repetitive elements will result in assays of low specificity, through amplification of multiple loci or annealing of the FRET probes to multiple sites.

[0120] PCR primers are designed (a) to have a length in the size range of 18 to 25 bases and matching sequences in the polymorphic locus, (b) to have a calculated melting temperature in the range of 57° C. to 60° C., e.g., corresponding to an optimal PCR annealing temperature of 52° C. to 55° C., (c) to produce a product that includes the polymorphic site and has a length in the size range of 75 to 250 base pairs. The PCR primers are preferably located on the locus so that the polymorphic site is at least one base away from the 3′ end of each PCR primer. The PCR primers must not contain regions that are extensively self- or inter-complementary.

[0121] FRET probes are designed to span the sequence of the polymorphic site, preferably with the polymorphism located in the 3′ most ⅔ of the oligonucleotide. In the preferred embodiment, the FRET probes will have incorporated at their 3′ end a chemical moiety referred to as the minor groove binder (MGB) that, when the probe is annealed to the template DNA, binds to the minor groove of the DNA, thus enhancing the stability of the probe-template complex. In addition the use of a non-fluorescing or “dark” quencher is employed. The probes should have a length in the range of 12 to 17 bases and, with the 3′ MGB, have a calculated melting temperature of 5° C. to 7° C. above that of the PCR primers. Probe design is disclosed in U.S. Pat. Nos. 5,538,848; 6,084,102; and 6,127,121.

[0122] Use Of Polymorphisms To Establish Marker/Trait Associations

[0123] The polymorphisms in the loci of this invention can be used in marker/trait associations that are inferred from statistical analysis of genotypes and phenotypes of the members of a population. These members may be individual organisms of, e.g., maize, families of closely related individuals, inbred lines, dihaploids or other groups of closely related individuals. Such maize groups are referred to as “lines”, indicating line of descent. The population may be descended from a single cross between two individuals or two lines (e.g., a mapping population) or it may consist of individuals with many lines of descent. Each individual or line is characterized by a single or average trait phenotype and by the genotypes at one or more marker loci.

[0124] Several types of statistical analysis can be used to infer marker/trait association from the phenotype/genotype data, but all are used is to detect markers, i.e., polymorphisms, for which alternative genotypes have significantly different average phenotypes. For example, if a given marker locus A has three alternative genotypes (AA, Aa and aa), and if those three classes of individuals have significantly different phenotypes, then one infers that locus A is associated with the trait. The significance of differences in phenotype may be tested by several types of standard statistical tests such as linear regression of marker genotypes on phenotype or analysis of variance (ANOVA). Commercially available statistical software packages commonly used to do this type of analysis include SAS Enterprise Miner (SAS Institute Inc., Cary, N.C.) and Splus (Insightful Corporation. Cambridge, Mass.).

[0125] Often the goal of an association study is not simply to detect marker/trait associations, but to estimate the location of genes affecting the trait directly (i.e., QTLs) relative to the marker locations. In a simple approach to this goal, one makes a comparison among marker loci of the magnitude of difference among alternative genotypes or the level of significance of that difference. Trait genes are inferred to be located nearest the marker(s) that have the greatest associated genotypic difference. In a more complex analysis, such as interval mapping (Lander and Botstein, Genetics 121:185-199, 1989), each of many positions along the genetic map (say at 1 cM intervals) is tested for the likelihood that a QTL is located at that position. The genotype/phenotype data are used to calculate for each test position a LOD score (log of likelihood ratio). When the LOD score exceeds a critical threshold value, there is significant evidence for the location of a QTL at that position on the genetic map (which will fall between two particular marker loci).

[0126] 1. Linkage Disequilibrium Mapping and Association Studies

[0127] Another approach to determining trait gene location is to analyze trait-marker associations in a population within which individuals differ at both trait and marker loci. Certain marker alleles may be associated with certain trait locus alleles in this population due to population genetic process such as the unique origin of mutations, founder events, random drift and population structure. This association is referred to as linkage disequilibrium. In linkage disequilibrium mapping, one compares the trait values of individuals with different genotypes at a marker locus. Typically, a significant trait difference indicates close proximity between marker locus and one or more trait loci. If the marker density is appropriately high and the linkage disequilibrium occurs only between very closely linked sites on a chromosome, the location of trait loci can be very precise.

[0128] A specific type of linkage disequilibrium mapping is known as association studies. This approach makes use of markers within candidate genes, which are genes that are thought to be functionally involved in development of the trait because of information such as biochemistry, physiology, transcriptional profiling and reverse genetic experiments in model organisms. In association studies, markers within candidate genes are tested for association with trait variation. If linkage disequilibrium in the study population is restricted to very closely linked sites (i.e., within a gene or between adjacent genes), a positive association provides nearly conclusive evidence that the candidate gene is a trait gene.

[0129] 2. Positional Cloning and Transgenic Applications

[0130] Traditional linkage mapping typically localizes a trait gene to an interval between two genetic markers (referred to as flanking markers). When this interval is relatively small (say less than 1 Mb), it becomes feasible to precisely identify the trait gene by a positional cloning procedure. A high marker density is required to narrow down the interval length sufficiently. This procedure requires a library of large insert genomic clones (such as a BAC library), where the inserts are pieces (usually 100-150 kb in length) of genomic DNA from the species of interest. The library is screened by probe hybridization or PCR to identify clones that contain the flanking marker sequences. Then a series of partially overlapping clones that connects the two flanking clones (a “contig”) is built up through physical mapping procedures. These procedures include fingerprinting, STS content mapping and sequence-tagged connector methodologies. Once the physical contig is constructed and sequenced, the sequence is searched for all transcriptional units. The transcriptional unit that corresponds to the trait gene can be determined by comparing sequences between mutant and wild type strains, by additional fine-scale genetic mapping, and/or by functional testing through plant transformation. Trait genes identified in this way become leads for transgenic product development. Similarly, trait genes identified by association studies with candidate genes become leads for transgenic product development.

[0131] 3. Marker-Aided Breeding and Marker-Assisted Selection

[0132] When a trait gene has been localized in the vicinity of genetic markers, those markers can be used to select for improved values of the trait without the need for phenotypic analysis at each cycle of selection. In marker-aided breeding and marker-assisted selection, associations between trait genes and markers are established initially through genetic mapping analysis (as in sections 1 or 2 above). In the same process, one determines which marker alleles are linked to favorable trait gene alleles. Subsequently, marker alleles associated with favorable trait gene alleles are selected in the population. This procedure will improve the value of the trait provided that there is sufficiently close linkage between markers and trait genes. The degree of linkage required depends upon the number of generations of selection because, at each generation, there is opportunity for breakdown of the association through recombination.

[0133] 4. Prediction of Crosses for New Inbred Line Development

[0134] The associations between specific marker alleles and favorable trait gene alleles also can be used to predict what types of progeny may segregate from a given cross. This prediction may allow selection of appropriate parents to generation populations from which new combinations of favorable trait gene alleles are assembled to produce a new inbred line. For example, if line A has marker alleles previously known to be associated with favorable trait alleles at loci 1, 20 and 31, while line B has marker alleles associated with favorable effects at loci 15, 27 and 29, then a new line could be developed by crossing A x B and selecting progeny that have favorable alleles at all 6 trait loci.

[0135] 5. Hybrid Prediction

[0136] Commercial corn seed is produced by making hybrids between two elite inbred lines that belong to different “heterotic groups”. These groups are sufficiently distinct genetically that hybrids between them show high levels of heterosis or hybrid vigor (i.e., increased performance relative to the parental lines). By analyzing the marker constitution of good hybrids, one can identify sets of alleles at different loci in both male and female lines that combine well to produce heterosis. Understanding these patterns, and knowing the marker constitution of different inbred lines, can allow prediction of the level of heterosis between different pairs of lines. These predictions can narrow down the possibilities of which line(s) of opposite heterotic group should be used to test the performance of a new inbred line.

[0137] 6. Identity by Descent

[0138] One theory of heterosis predicts that regions of identity by descent (IBD) between the male and female lines used to produce a hybrid will reduce hybrid performance. Identity by descent can be inferred from patterns of marker alleles in different lines. An identical string of markers at a series of adjacent loci may be considered identical by descent if it is unlikely to occur independently by chance. Analysis of marker fingerprints in male and female lines can identify regions of IBD. Knowledge of these regions can inform the choice of hybrid parents, because avoiding IBD in hybrids is likely to improve performance. This knowledge may also inform breeding programs in that crosses could be designed to produce pairs of inbred lines (one male and one female) that show little or no IBD.

[0139] A fingerprint of an inbred line is the combination of alleles at a set of marker loci. High density fingerprints can be used to establish and trace the identity of germplasm, which has utility in germplasm ownership protection.

[0140] Genetic markers are used to accelerate introgression of transgenes into new genetic backgrounds (i.e., into a diverse range of germplasm). Simple introgression involves crossing a transgenic line to an elite inbred line and then backcrossing the hybrid repeatedly to the elite (recurrent) parent, while selecting for maintenance of the transgene. Over multiple backcross generations, the genetic background of the original transgenic line is replaced gradually by the genetic background of the elite inbred through recombination and segregation. This process can be accelerated by selection on marker alleles that derive from the recurrent parent.

[0141] Use of Polymorphism Assay for Mapping a Library of DNA Clones

[0142] The polymorphisms and loci of this invention are useful for identifying and mapping DNA sequence of QTLs and genes linked to the polymorphisms. For instance, BAC or YAC clone libraries can be queried using polymorphisms linked to a trait to find a clone containing specific QTLs and genes associated with the trait. For instance, QTLs and genes in a plurality, e.g., hundreds or thousands, of large, multi-gene sequences can be identified by hybridization with an oligonucleotide probe that hybridizes to a mapped or linked polymorphism. Such hybridization screening can be improved by providing clone sequence in a high density array. The screening method is more preferably enhanced by employing a pooling strategy to significantly reduce the number of hybridizations required to identify a clone containing the polymorphism. When the polymorphisms are mapped, the screening effectively maps the clones.

[0143] For instance, in a case where thousands of clones are arranged in a defined array, e.g., in 96-well plates, the plates can be arbitrarily arranged in three-dimensionally, arrayed stacks of wells each comprising a unique DNA clone. The wells in each stack can be represented as discrete elements in a three dimensional array of rows, columns and plates. In one aspect of the invention, the number of stacks and plates in a stack are about equal to minimize the number of assays. The stacks of plates allow the construction of pools of cloned DNA.

[0144] For a three-dimensionally arrayed stack, pools of cloned DNA can be created for (a) all of the elements in each row, (b) all of the elements of each column, and (c) all of the elements of each plate. Hybridization screening of the pools with an oligonucleotide probe that hybridizes to a polymorphism unique to one of the clones will provide a positive indication for one column pool, one row pool and one plate pool, thereby indicating the well element containing the target clone.

[0145] In the case of multiple stacks, additional pools of all of the clone DNA in each stack allow indication of the stack having the row-column-plate coordinates of the target clone. For instance, a 4608 clone set can be disposed in 48 96-well plates. The 48 plates can be arranged in 8 sets of 6-plate stacks providing 6×12×8 three-dimensional arrays of elements, i.e., each stack comprises 6 stacks of 8 rows and 12 columns. For the entire clone set there are 36 pools, i.e., 6 stack pools, 8 row pools, 12 column pools and 8 stack pools. Thus, a maximum of 36 hybridization reactions is required to find the clone harboring QTLs or genes associated or linked to each mapped polymorphism.

[0146] Once a clone is identified, genes within that clone can be tested for whether they affect the trait by analysis of recombinants in a mapping population, further linkage disequilibrium analysis, and ultimately transgenic testing. Additional genes can be identified by finding additional clones overlapping the one containing the original polymorphism through contig building, as described above.

[0147] Breeding Plants of the Invention

[0148] In addition to direct transformation of a particular plant genotype with a construct prepared according to the current invention, transgenic plants may be made by crossing a plant having a construct of the invention to a second plant lacking the construct. For example, a selected coding region operably linked to a promoter can be introduced into a particular plant variety by crossing, without the need for ever directly transforming a plant of that given variety. Therefore, the current invention not only encompasses a plant directly regenerated from cells that have been transformed in accordance with the current invention, but also the progeny of such plants. As used herein the term “progeny” denotes the offspring of any generation of a parent plant prepared in accordance with the instant invention, wherein the progeny comprises a construct prepared in accordance with the invention. “Crossing” a plant to provide a plant line having one or more added transgenes relative to a starting plant line, as disclosed herein, is defined as the techniques that result in a transgene of the invention being introduced into a plant line by crossing a starting line with a donor plant line that comprises a transgene of the invention. To achieve this one could, for example, perform the following steps:

[0149] (a) plant seeds of the first (starting line) and second (donor plant line that comprises a transgene of the invention) parent plants;

[0150] (b) grow the seeds of the first and second parent plants into plants that bear flowers;

[0151] (c) pollinate a flower from the first parent plant with pollen from the second parent plant; and

[0152] (d) harvest seeds produced on the parent plant bearing the fertilized flower.

[0153] Backcrossing is herein defined as the process including the steps of:

[0154] (a) crossing a plant of a first genotype containing a desired gene, DNA sequence or element to a plant of a second genotype lacking the desired gene, DNA sequence or element;

[0155] (b) selecting one or more progeny plants containing the desired gene, DNA sequence or element;

[0156] (c) crossing the progeny plant to a plant of the second genotype; and

[0157] (d) repeating steps (b) and (c) for the purpose of transferring the desired gene, DNA sequence or element from a plant of a first genotype to a plant of a second genotype.

[0158] Plant Breeding

[0159] Introgression of a DNA element into a plant genotype is defined as the result of the process of backcross conversion. A plant genotype into which a DNA sequence has been introgressed may be referred to as a backcross converted genotype, line, inbred, or hybrid. Similarly a plant genotype lacking the desired DNA sequence may be referred to as an unconverted genotype, line, inbred, or hybrid.

[0160] Backcrossing can be used to improve a starting plant. Backcrossing transfers a specific desirable trait from one source to an inbred or other plant that lacks that trait. This can be accomplished, for example, by first crossing a superior inbred (A) (recurrent parent) to a donor inbred (non-recurrent parent), which carries the appropriate gene(s) for the trait in question, for example, a construct prepared in accordance with the current invention. The progeny of this cross first are selected in the resultant progeny for the desired trait to be transferred from the non-recurrent parent, then the selected progeny are mated back to the superior recurrent parent (A). After five or more backcross generations with selection for the desired trait, the progeny are hemizygous for loci controlling the characteristic being transferred but are like the superior parent for most or almost all other genes. The last backcross generation would be selfed to give progeny that are pure breeding for the gene(s) being transferred, i.e., one or more transformation events.

[0161] Therefore, through a series a breeding manipulations, a selected transgene may be moved from one line into an entirely different line without the need for further recombinant manipulation. Transgenes are valuable in that they typically behave genetically as any other gene and can be manipulated by breeding techniques in a manner identical to any other corn gene. Therefore, one may produce inbred plants that are true breeding for one or more transgenes. By crossing different inbred plants, one may produce a large number of different hybrids with different combinations of transgenes. In this way, plants may be produced that have the desirable agronomic properties frequently associated with hybrids (“hybrid vigor”), as well as the desirable characteristics imparted by one or more transgene(s).

[0162] It is desirable to introgress the genes of the present invention into maize hybrids for characterization of the phenotype conferred by each gene in a transformed plant. The host genotype into which the transgene was introduced, preferably LH59, is an elite inbred and therefore only limited breeding is necessary in order to produce high yielding maize hybrids. The transformed plant, regenerated from callus is crossed, to the same genotype, e.g., LH59. The progeny are self-pollinated twice, and plants homozygous for the transgene are identified. Homozygous transgenic plants are crossed to a testcross parent in order to produce hybrids. The test cross parent is an inbred belonging to a heterotic group that is different from that of the transgenic parent and for which it is known that high yielding hybrids can be generated, for example hybrids are produced from crosses of LH59 to either LH 195 or LH200.

[0163] The following examples illustrate the identification of polymorphic markers useful for mapping and isolating genes of this invention and as markers of QTLs and genes associated with an oil-related trait. Other examples illustrate the identification of oil-related genes and partial genes. Still other examples illustrate methods for inserting genes of this invention into a plant expression vector, i.e., operably linked to a promoter and other regulatory elements, to confer an oil-related trait to a transgenic plant.

### EXAMPLE 1

[0164] This example illustrates the identification of oil-associated genes and maize oil markers.

[0165] a. Candidate Oil Genes

[0166] A set of more than 800 candidate oil genes was identified (a) as homologs of plant genes that are believed to be in an oil-related metabolic pathway of a model plant such as Arabidopsis thaliana; (b) by comparing transcription profiling results for high oil and low oil maize lines; and (c) by subtractive hybridization between endosperm tissues of high oil and low oil maize lines. The sequences of the candidate oil genes were queried against a proprietary collection of maize genes and partial maize genes, e.g., genomic sequence or ESTs, to identify a set of more than 800 candidate maize oil genes.

[0167] b. Maize Polymorphisms

[0168] Maize polymorphisms were identified by comparing alignments of DNA sequences from separate maize lines. Candidate polymorphisms were qualified by the following parameters:

[0169] (a) The minimum length of sequence for a synthetic reference sequence is 200 bases.

[0170] (b) The percentage identity of observed bases in a region of 15 bases on each side of a candidate SNP is 75%.

[0171] (c) The minimum phred quality in each of the various sequences at a polymorphism site is 35.

[0172] (d) The minimum phred quality in a region of 15 bases on each side of the polymorphism site is 20.

[0173] c. Oil Informative Markers

[0174] The SNP and Indel polymorphisms in each locus were qualified for detection by development of an assay, e.g., Taqman® allele discrimination assay (Applied Biosystems, Foster City, Calif.). Assay qualified polymorphisms are evaluated for oil informativeness by comparing allelic frequencies in the two parental lines of an association study population. The parent lines were representatives of an oil rich maize population and an oil poor maize population, i.e., the University of Illinois High Oil and Low Oil maize lines as described by Dudley and Lambert (1992, Maydica 37: 81-87). Informativeness is reported as an allelic frequency difference between parental populations, i.e., the high oil line and the low oil line. When one of the parents, e.g., the high oil line, is fixed, its allelic frequency is 1. Markers were qualified if they had an allelic frequency difference of at least 0.6. If the marker was fixed in either parent with a frequency of 0 or 1, a marker could be selected at a lower allelic frequency difference of at least 0.4. The informative markers were viewed on a genetic map to identify marker-deficient regions of chromosomes. Markers with lower allelic frequency difference, e.g., as low as 0.15, were selected to fill in the marker-deficient regions of chromosomes. A set of informative markers were used in a marker-trait association study to verify oil-associated genes from the set of candidate oil genes.

[0175] d. Labeled Probe Degradation Assay for SNP Detection

[0176] A quantity of maize genomic template DNA (e.g., about 2-20 ng) is mixed in 5 μL total volume with four oligonucleotides, which can be designed by Applied Biosystems, i.e., a forward primer, a reverse primer, a hybridization probe having a VIC reporter attached to the 5′ end, and a hybridization probe having a FAM reporter attached to the 5′ end as well as PCR reaction buffer containing the passive reference dye ROX. The PCR reaction is conducted for 35 cycles using a 60° C. annealing-extension temperature. Following the reaction, the fluorescence of each fluorophore as well as that of the passive reference is determined in a fluorimeter. The fluorescence value for each fluorophore is normalized to the fluorescence value of the passive reference. The normalized values are plotted against each other for each sample. The data points should fall into clearly separable clusters.

[0177] To confirm that an assay produces accurate results, each new assay is performed on a number of replicates of samples of known genotypic identity representing each of the three possible genotypes, i.e., two homozygous alleles and a heterozygous sample. To be a valid and useful assay, it must produce clearly separable clusters of data points, such that one of the three genotypes can be assigned for at least 90% of the data points, and the assignment is observed to be correct for at least 98% of the data points. Subsequent to this validation step, the assay is applied to progeny of a cross between two highly inbred individuals to obtain segregation data, which are then used to calculate a genetic map position for the polymorphic locus.

[0178] e. Marker Mapping

[0179] The maize markers were genetically mapped based on the genotypes of certain SNPs. The genotypes were combined with genotypes for public core SSR and RFLP markers scored on recombinant inbred lines. Before mapping, any loci showing distorted segregation (P<0.0 for a Chi-square test of a 1:1 segregation ratio) were removed. These loci could be added to the map later but without allowing them to change marker order.

[0180] A map was constructed using the JoinMap version 2.0 software, which is described by Stam (“Construction of integrated genetic linkage maps by means of a new computer package: JoinMap, The Plant Journal, 3: 739-744 (1993); Stam, P. and van Ooijen, J. W. “JoinMap version 2.0: Software for the calculation of genetic linkage maps (1995) CPRO-DLO, Wageningen). JoinMap implements a weighted-least squares approach to multipoint mapping in which information from all pairs of linked loci (adjacent or not) is incorporated. Linkage groups were formed using a LOD threshold of 5.0. The SSR and RFLP public markers were used to assign linkage groups to chromosomes. Linkage groups were merged within chromosomes before map construction.

[0181] Haldane's mapping function was used to convert recombination fractions to map distances. Lenient criteria was applied for excluding pairwise linkage data; only data with a LOD not greater than 0.001 or a recombination fraction not less than 0.499 are excluded. Parameters for ordering loci were a jump threshold of 5.0, a triplet threshold of 7.0 and a ripple value of 3. About 38% of the loci were ordered in two rounds of map construction with a jump threshold of 5.0, which prevents the addition of a locus to the map if such addition results in a jump of more than 5.0 to a goodness-of-fit criterion. The remaining loci were added to the map without application of such a jump threshold. Addition of these loci had a negligible effect on the map order and distances for the initial loci. Mapped SNP polymorphisms are identified in Table 2.

[0182] f. Marker Trait Association

[0183] The informative maize markers were used in an association study to identify which of the candidate genes were more significantly associated with oil level in corn (Zea mays).

[0184] The University of Illinois has corn lines differing in seed oil that have been developed by long-term selection. A high oil line (IHO) produces about 18% seed oil and a low oil line (ILO) produces about 1.5% seed oil. The IHO and ILO lines are available from the University of Illinois for research. A random mated population (RMn) was produced from random mating offspring of a cross between IHO and ILO by chain crossing for 10 generations to produce an RM10 population. From the RM10 population, 504 S1-derived lines were developed by selfing and these lines constitute an association study population. This population along with 72 control samples were genotyped using oil informative SNPs.

[0185] Phenotypes were measured on 504 association population lines in replicated field trials with an alph(0,1) incomplete block design. The field trials comprised the 504 lines grown in each of two years at each of 3 locations with 2 replicates per location. The lines were blocked within each replicate. These field trials were performed on the 504 RM10:S1 lines, per se, and on hybrids made by crossing each line to a tester line, i.e., line 7051.

[0186] Association was analyzed between the SNP markers and oil level in the RM10:S1 lines, per se, and in the hybrids. A mixed model analysis of variance was performed with sources of variation: location, reps within location, blocks and lines. Line effects for both % oil in the kernel and weight of oil per 200 kernels estimated from this model were used in a linear model analysis of variance based on single marker genotypes classes (AA, Aa and aa) for all genotyped markers. Through this analysis, a total of 186 markers showed a significant effect on the trait at the p<0.05 level. These 186 significant markers which are very likely to either reside within an oil gene or to be closely linked to an oil gene are in the 186 polymorphic loci of SEQ ID NO: 1 through SEQ ID NO:186 and identified more particularly in Table 1. A set of 159 of the candidate genes having sequence that either overlaps with, or is associated by linkage disequilibrium with, any one or more of the 186 genomic amplicons of SEQ ID NO:1 through SEQ ID NO:186 were identified and designated as oil-associated genes and are identified as having a cDNA sequence of SEQ ID NO:187 through SEQ ID NO:345. Because these oil-associated genes contain or are associated by linkage disequilibrium to a statistically significant maize oil marker, these oil-associated genes are most likely to be oil genes.

[0187] Table 1 provides a description of 186 genomic amplicons defining polymorphic loci of the maize oil markers of this invention, 159 oil-associated genes and the cognate proteins, and homologous protein sequence from other species (identified as disclosed in Example 3 below). These particular aspects of the invention are identified by:

[0188] SEQ_NUM, which refers to the sequence number of the nucleic acid sequence or amino acid sequence, e.g., a SEQ ID NO.______; and

[0189] SEQ_ID, which refers to an arbitrary identifying name for an amplicon, e.g. “nnn”, for an oil-associated gene, e.g., “MRT4577_nnnnC”, for a cognate protein of an oil-associated gene, e.g., “MRT4577_nnnnP”, of for a cognate protein of a homolog to an oil-associated gene, e.g., “MRT4577_nnnnP” or a name from a database such as GenBank, e.g., “gi:6539874”.

[0190] More particularly, the maize oil markers in the 186 genomic amplicons are described by:

[0191] MUTATION_ID, which refers to one or more arbitrary identifying names for each polymorphism;

[0192] START_POS, which refers to the position in the nucleotide sequence of the polymorphic maize DNA locus where the polymorphism begins;

[0193] END_POS, which refers to the position in the nucleotide sequence of the polymorphic maize DNA locus where the polymorphism ends; for SNPs the START_POS and END_POS are common;

[0194] TYPE, which refers to the identification of the polymorphism as an SNP or IND (Indel);

[0195] ALLELEn and STRAINn, which refer to the nucleotide sequence of a polymorphism in a specific allelic maize variety; and

[0196] GENE_ID refers to the SEQ_ID of the oil-associated gene identified later in Table 1 except in the case of amplicons of SEQ ID NO:162 through SEQ ID NO:186 where “unknown” indicates informative maize oil markers that are not associated with an identified oil-associated gene.

[0197] More particularly, the oil-associated genes and their cognate proteins are described by:

[0198] DESCRIPTION, which refers to a functional description of an oil-associated gene, e.g., “gene encoding MRT4577_nnnnP” or a functional description of a cognate protein, e.g., a GenBank annotation or “long ORF” indicating no known protein function for an amino acid sequence that is translated from a longest available ORF.

[0199] And, more particularly, the homologs of the oil-associated genes beginning with SEQ ID NO:505 are described by:

[0200] SPECIES, which refers to the species of origin for the DNA encoding the protein sequence of the homolog; and

[0201] HOMOLOG_BASE_PROTEIN, which refers to an arbitrary identifying name for the cognate protein of an oil-associated gene, e.g., “MRT4577_nnnnP” that provided the amino acid sequence that was used to identify the homolog of the oil-associated gene.

[0202] Table 2 provides genetic map positions of maize oil markers and linked oil-associated genes; a description of the probability of significance of the marker/trait association (as determined from per se or hybrid association analysis for the marker); and the identification and sequence number of the oil-associated gene and their translated proteins. More particularly, Table 2 identifies maize oil markers, oil-associated genes and proteins by

[0203] Map Position, which identifies the distance measured in cM from the 5′ end of a maize chromosome for the SNP identified by Mutation ID, which refers to an arbitrary identifying name for each polymorphism;

[0204] Seq Num, which refers to the sequence number of a genomic amplicon containing the maize oil marker;

[0205] Protein Seq Num, which refers to the sequence number of the amino acid sequence, e.g., a SEQ ID NO, for the cognate protein encoded by a linked oil-associated gene;

[0206] Pval % Oil Per se, which refers to probability of a test of significance of the regression of marker genotype on oil level as percent oil per kernel for inbred lines;

[0207] Pval % Oil Hybrid, which refers to probability of a test of significance of the regression of marker genotype on oil level as percent oil per kernel for hybrid lines;

[0208] Pval Oil/Kernel Per se, which refers to probability of a test of significance of the regression of marker genotype on oil level as oil weight per 200 kernels for inbred lines;

[0209] Pval Oil/Kernel Hybrid, which refers to probability of a test of significance of the regression of marker genotype on oil level as oil weight per 200 kernels for hybrid lines.

TABLE 2

| | | | Protein | Pval | Pval | Pval | Pval |
|---|---|---|---|---|---|---|---|
| Map | | Seq | Seq | % Oil | % Oil | Oil/Kernel | Oil/Kernel |
| Position | Mutation_ID | Num | Num | Per se | Hybrid | Per se | Hybrid |
| 1-3.7 | 111829 | 185 | — | 0.706 | 0.234 | 0.336 | 0.046 |
| 1-25.1 | 43230 | 80 | 425 | 0.030 | 0.228 | 0.042 | 0.037 |
| 1-44 | 104827 | 105 | 450 | 0.094 | 0.801 | 0.018 | 0.909 |
| 1-45 | 151360 | 156 | 499 | 0.025 | 0.811 | 0.005 | 0.395 |
| 1-46.8 | 37716 | 69 | 414 | 0.009 | 0.113 | 0.024 | 0.351 |
| 1-53.3 | 42173 | 79 | 424 | 0.020 | 0.050 | 0.024 | 0.907 |
| 1-58.4 | 116 | 1 | 346 | 0.059 | 0.018 | 0.018 | 0.395 |
| 1-60.3 | 143100 | 136 | 481 | 0.722 | 0.029 | 0.878 | 0.501 |
| 1-60.6 | 33819 | 57 | 402 | 0.200 | 0.039 | 0.043 | 0.640 |
| 1-60.6 | 40189 | 75 | 420 | 0.007 | 1.6E−4 | 0.062 | 0.172 |
| 1-83.2 | 34205 | 58 | 403 | 0.026 | 0.151 | 0.090 | 0.022 |
| 1-86.3 | 8984 | 14 | 359 | 0.405 | 8.0E−4 | 0.433 | 0.069 |
| 1-86.3 | 36286 | 62 | 407 | 0.261 | 7.3E−4 | 0.328 | 0.069 |
| 1-88.8 | 29829 | 42 | 387 | 0.063 | 0.164 | 0.597 | 0.029 |
| 1-88.8 | 37068 | 65 | 410 | 0.026 | 0.317 | 0.068 | 0.051 |
| 1-90.5 | 111828 | 133 | 478 | 0.052 | 0.198 | 0.018 | 0.014 |
| 1-91 | 113263 | 135 | 480 | 0.281 | 0.004 | 0.078 | 0.489 |
| 1-91.8 | 104474 | 104 | 449 | 0.047 | 0.346 | 0.776 | 0.069 |
| 1-96.9 | 36448 | 63 | 408 | 0.006 | 0.114 | 0.002 | 0.052 |
| 1-99 | 40655 | 77 | 422 | 0.029 | 0.272 | 0.052 | 0.080 |
| 1-99 | 107077 | 113 | 458 | 9.7E−6 | 0.014 | 9.1E−4 | 0.021 |
| 1-103.3 | 8719 | 10 | 355 | 0.167 | 0.728 | 0.008 | 0.271 |
| 1-124.6 | 33373 | 56 | 401 | 0.029 | 0.240 | 0.201 | 0.714 |
| 1-130.3 | 69565 | 93 | 438 | 0.032 | 0.201 | 0.568 | 0.962 |
| 1-165.6 | 108862 | 120 | 465 | 0.011 | 0.001 | 0.402 | 0.347 |
| 1-178.6 | 151382 | 154 | 497 | 0.027 | 0.480 | 0.116 | 0.509 |
| 1-200.3 | 30840 | 47 | 392 | 0.662 | 0.050 | 0.716 | 0.012 |
| 2-5.8 | 31064 | 48 | 393 | 0.091 | 0.002 | 0.143 | 0.064 |
| 2-12.9 | 104447 | 180 | — | 0.077 | 0.012 | 0.697 | 0.459 |
| 2-14.1 | 39289 | 73 | 418 | 0.095 | 0.016 | 0.778 | 0.571 |
| 2-17.5 | 106678 | 110 | 455 | 0.048 | 0.003 | 0.043 | 0.040 |
| 2-19.5 | 82235 | 99 | 444 | 0.018 | 0.002 | 0.045 | 0.009 |
| 2-33.9 | 80031 | 97 | 442 | 0.101 | 0.046 | 0.557 | 0.036 |
| 2-35.9 | 13691 | 22 | 367 | 0.225 | 0.469 | 0.040 | 0.419 |
| 2-78.2 | 11466 | 19 | 364 | 0.096 | 0.761 | 0.045 | 0.225 |
| 2-78.2 | 79073 | 96 | 441 | 0.020 | 0.825 | 0.015 | 0.413 |
| 2-78.2 | 108493 | 119 | 464 | 0.142 | 0.045 | 0.713 | 0.299 |
| 2-92.5 | 3177 | 4 | 349 | 0.082 | 0.334 | 0.038 | 0.224 |
| 2-92.9 | 84829 | 102 | 447 | 0.298 | 0.324 | 0.111 | 0.031 |
| 2-99.7 | 151288 | 155 | 498 | 0.549 | 0.036 | 0.245 | 0.846 |
| 2-106 | 111475 | 131 | 476 | 0.238 | 0.013 | 0.320 | 0.685 |
| 2-106.2 | 108013 | 117 | 462 | 0.574 | 0.033 | 0.441 | 0.591 |
| 2-107.6 | 2307 | 3 | 348 | 0.497 | 0.019 | 0.437 | 0.413 |
| 2-114.9 | 22775 | 34 | 379 | 0.036 | 0.064 | 0.424 | 0.160 |
| 2-123.4 | 104954 | 107 | 452 | 0.049 | 0.058 | 0.573 | 0.765 |
| 2-152.4 | 43579 | 81 | 426 | 0.064 | 0.123 | 0.037 | 0.659 |
| 2-164.2 | 735 | 2 | 347 | 0.497 | 0.920 | 0.048 | 0.729 |
| 2-164.2 | 76792 | 95 | 440 | 0.939 | 0.524 | 0.044 | 0.345 |
| 3-6 | 8911 | 165 | — | 0.067 | 0.561 | 0.045 | 0.979 |
| 3-6 | 51614 | 86 | 431 | 0.071 | 0.551 | 0.030 | 0.980 |
| 3-9.1 | 10667 | 18 | 363 | 0.009 | 0.193 | 0.068 | 0.262 |
| 3-19.7 | 19963 | 169 | — | 0.115 | 0.084 | 0.029 | 0.373 |
| 3-19.7 | 32137 | 53 | 398 | 2.4E−4 | 1.1E−4 | 2.3E−4 | 0.037 |
| 3-46.2 | 49293 | 84 | 429 | 0.036 | 0.003 | 0.167 | 0.030 |
| 3-52.3 | 109315 | 121 | 466 | 0.175 | 7.7E−4 | 0.527 | 0.040 |
| 3-53.5 | 25000 | 172 | — | 0.098 | 4.5E−4 | 0.350 | 0.157 |
| 3-54.1 | 21154 | 31 | 376 | 0.060 | 7.7E−4 | 0.543 | 0.542 |
| 3-54.1 | 109722 | 126 | 471 | 0.482 | 0.022 | 0.526 | 0.284 |
| 3-57.2 | 109509 | 124 | 469 | 0.394 | 0.006 | 0.464 | 0.213 |
| 3-58.6 | 29867 | 43 | 388 | 0.036 | 1.8E−8 | 0.696 | 0.169 |
| 3-59.3 | 4599 | 8 | 353 | 0.093 | 7.9E−4 | 0.562 | 0.571 |
| 3-59.3 | 21190 | 33 | 378 | 0.020 | 0.006 | 0.637 | 0.215 |
| 3-59.3 | 28923 | 39 | 384 | 0.150 | 9.6E−4 | 0.703 | 0.351 |
| 3-59.3 | 147511 | 149 | 493 | 0.116 | 0.001 | 0.588 | 0.571 |
| 3-59.3 | 147768 | 150 | 493 | 0.066 | 7.6E−4 | 0.627 | 0.524 |
| 3-60.4 | 8685 | 164 | — | 0.592 | 0.001 | 0.913 | 0.681 |
| 3-61 | 16729 | 26 | 371 | 0.229 | 0.112 | 0.198 | 0.005 |
| 3-61.7 | 32247 | 54 | 399 | 0.115 | 3.5E−4 | 0.891 | 0.113 |
| 3-62.7 | 9144 | 167 | — | 0.066 | 0.003 | 0.277 | 0.014 |
| 3-62.7 | 9739 | 16 | 361 | 0.031 | 0.003 | 0.439 | 0.130 |
| 3-111.4 | 110780 | 129 | 474 | 0.246 | 0.040 | 0.572 | 0.207 |
| 3-123.8 | 143969 | 140 | 485 | 0.015 | 0.158 | 0.081 | 0.438 |
| 3-127.7 | 9079 | 166 | — | 0.040 | 0.071 | 0.296 | 0.134 |
| 4-38.7 | 110069 | 182 | — | 0.026 | 0.048 | 0.188 | 0.108 |
| 4-38.7 | 111464 | 184 | — | 0.029 | 0.053 | 0.129 | 0.096 |
| 4-52.8 | 24647 | 36 | 381 | 0.013 | 0.084 | 0.382 | 0.827 |
| 4-53.2 | 156243 | 161 | 504 | 0.004 | 0.007 | 0.096 | 0.368 |
| 4-62.1 | 10671 | 20 | 365 | 0.156 | 0.040 | 0.337 | 0.099 |
| 4-64.9 | 38852 | 176 | — | 0.285 | 0.072 | 0.342 | 0.007 |
| 4-69.5 | 5021 | 9 | 354 | 0.341 | 0.499 | 0.098 | 0.004 |
| 4-69.5 | 37503 | 66 | 411 | 0.262 | 0.126 | 0.303 | 0.002 |
| 4-69.9 | 107276 | 114 | 459 | 0.006 | 0.331 | 0.017 | 0.016 |
| 4-71.4 | 84527 | 101 | 446 | 0.346 | 0.014 | 0.363 | 0.040 |
| 4-80 | 106845 | 112 | 457 | 0.112 | 0.042 | 0.393 | 0.434 |
| 4-107.7 | 106491 | 109 | 454 | 0.020 | 0.040 | 0.409 | 0.521 |
| 4-112.4 | 54460 | 87 | 432 | 0.037 | 0.146 | 0.124 | 0.150 |
| 4-122.4 | 151472 | 153 | 496 | 0.186 | 0.994 | 0.011 | 0.967 |
| 4-128.1 | 32049 | 52 | 397 | 0.195 | 0.620 | 0.756 | 0.011 |
| 4-135.8 | 17900 | 28 | 373 | 4.2E−4 | 0.037 | 3.7E−4 | 0.019 |
| 4-136.4 | 147219 | 148 | 492 | 0.038 | 0.214 | 0.104 | 0.029 |
| 5-1.6 | 24265 | 35 | 380 | 0.082 | 0.035 | 0.472 | 0.010 |
| 5-39.9 | 109403 | 123 | 468 | 2.0E−6 | 9.1E−5 | 0.135 | 0.006 |
| 5-41.7 | 16527 | 25 | 370 | 0.028 | 0.161 | 0.333 | 0.791 |
| 5-50.9 | 109342 | 122 | 467 | 0.005 | 0.167 | 0.015 | 0.024 |
| 5-51.9 | 16762 | 27 | 372 | 7.6E−5 | 0.018 | 4.9E−4 | 0.029 |
| 5-51.9 | 16767 | 168 | — | 1.2E−4 | 0.017 | 5.1E−4 | 0.033 |
| 5-62.3 | 51419 | 85 | 430 | 0.046 | 0.002 | 0.163 | 0.031 |
| 5-63 | 32272 | 55 | 400 | 5.7E−5 | 0.001 | 0.008 | 0.100 |
| 5-66.9 | 30000 | 174 | — | 0.004 | 6.5E−4 | 0.035 | 0.002 |
| 5-66.9 | 146415 | 147 | 491 | 1.1E−4 | 1.9E−5 | 0.163 | 0.037 |
| 5-69.6 | 144731 | 186 | — | 8.5E−4 | 2.8E−4 | 0.162 | 0.042 |
| 5-70.5 | 105854 | 181 | — | 0.205 | 0.011 | 0.976 | 0.063 |
| 5-71.7 | 143216 | 137 | 482 | 0.023 | 0.014 | 0.065 | 0.098 |
| 5-76.4 | 29820 | 41 | 386 | 0.010 | 5.8E−4 | 0.128 | 0.140 |
| 5-80.2 | 36637 | 64 | 409 | 0.020 | 0.052 | 0.087 | 0.365 |
| 5-104.5 | 58375 | 89 | 434 | 0.028 | 0.097 | 0.024 | 0.003 |
| 5-150.5 | 31084 | 49 | 394 | 0.025 | 0.210 | 0.350 | 0.763 |
| 6-17.3 | 154854 | 159 | 502 | 0.010 | 0.222 | 0.049 | 0.688 |
| 6-30.8 | 69630 | 94 | 439 | 0.484 | 0.678 | 0.094 | 0.047 |
| 6-37.3 | 36067 | 61 | 406 | 0.018 | 0.290 | 0.215 | 0.874 |
| 6-37.3 | 36073 | 61 | 406 | 0.014 | 0.165 | 0.234 | 0.945 |
| 6-43.1 | 30176 | 45 | 390 | 0.827 | 0.323 | 0.969 | 0.015 |
| 6-52.8 | 4463 | 7 | 352 | 3.9E−9 | 1.8E−12 | 2.3E−6 | 3.7E−9 |
| 6-53.1 | 60751 | 91 | 436 | 3.9E−9 | 1.6E−6 | 5.4E−7 | 2.2E−4 |
| 6-53.5 | 32034 | 51 | 396 | 5.0E−7 | 3.7E−4 | 5.3E−5 | 0.048 |
| 6-53.5 | 57758 | 88 | 433 | 6.3E−5 | 0.008 | 0.002 | 0.566 |
| 6-53.5 | 108212 | 118 | 463 | 8.6E−7 | 6.0E−4 | 4.0E−5 | 0.043 |
| 6-58.1 | 59008 | 90 | 435 | 9.7E−5 | 3.9E−4 | 8.2E−5 | 0.002 |
| 6-58.1 | 146195 | 146 | 490 | 5.3E−4 | 8.5E−4 | 1.8E−5 | 0.004 |
| 6-59.9 | 3277 | 5 | 350 | 0.004 | 0.215 | 0.087 | 0.515 |
| 6-59.9 | 105586 | 108 | 453 | 0.003 | 4.9E−4 | 0.002 | 0.001 |
| 6-61.5 | 148039 | 151 | 494 | 0.120 | 7.6E−4 | 0.565 | 0.006 |
| 6-61.5 | 155861 | 160 | 503 | 0.082 | 7.2E−4 | 0.490 | 0.003 |
| 6-63.1 | 20410 | 32 | 377 | 0.028 | 0.012 | 0.055 | 0.138 |
| 6-66.6 | 8838 | 12 | 357 | 0.050 | 0.009 | 0.031 | 0.025 |
| 6-67.5 | 14694 | 24 | 369 | 0.226 | 8.2E−4 | 0.496 | 0.151 |
| 6-86.9 | 110972 | 130 | 475 | 0.023 | 0.050 | 0.072 | 0.482 |
| 6-110.4 | 31684 | 50 | 395 | 0.012 | 9.6E−4 | 0.162 | 0.240 |
| 6-121 | 37634 | 68 | 413 | 0.002 | 0.052 | 0.052 | 0.008 |
| 6-132.7 | 37555 | 67 | 412 | 0.089 | 0.364 | 0.665 | 0.025 |
| 7-62 | 42164 | 78 | 423 | 0.075 | 0.424 | 0.045 | 0.235 |
| 7-67 | 30674 | 46 | 391 | 0.424 | 0.048 | 0.187 | 0.015 |
| 7-68.7 | 39064 | 71 | 416 | 0.321 | 0.558 | 0.028 | 0.357 |
| 7-72.8 | 42930 | 177 | — | 0.111 | 0.076 | 0.006 | 0.002 |
| 7-74.2 | 68426 | 92 | 437 | 0.013 | 0.662 | 0.047 | 0.088 |
| 7-98.5 | 8799 | 11 | 356 | 0.031 | 0.429 | 0.009 | 0.160 |
| 7-98.8 | 48425 | 82 | 427 | 7.4E−4 | 0.063 | 2.6E−4 | 0.034 |
| 7-99.8 | 4415 | 163 | — | 6.9E−4 | 0.057 | 1.5E−4 | 0.032 |
| 7-99.8 | 35408 | 59 | 404 | 0.003 | 0.055 | 0.002 | 0.069 |
| 7-107.5 | 38914 | 70 | 415 | 0.024 | 0.002 | 0.682 | 0.747 |
| 7-115.8 | 4093 | 162 | — | 0.185 | 0.007 | 0.512 | 0.050 |
| 7-118.6 | 4302 | 6 | 351 | 0.032 | 6.5E−4 | 0.522 | 0.120 |
| 7-118.6 | 38653 | 175 | — | 0.199 | 0.011 | 0.471 | 0.035 |
| 7-118.6 | 81460 | 98 | 443 | 0.061 | 0.002 | 0.578 | 0.257 |
| 7-122.2 | 145260 | 143 | 488 | 0.062 | 0.003 | 0.108 | 0.003 |
| 7-124.5 | 15184 | 23 | 368 | 0.044 | 0.009 | 0.079 | 0.008 |
| 7-124.5 | 39773 | 74 | 419 | 0.065 | 0.022 | 0.814 | 0.608 |
| 7-132.8 | 30029 | 44 | 389 | 0.330 | 0.046 | 0.577 | 0.552 |
| 8-16.4 | 40320 | 76 | 421 | 0.657 | 0.063 | 0.405 | 0.006 |
| 8-40.9 | 107937 | 116 | 461 | 0.048 | 0.046 | 0.221 | 0.077 |
| 8-43.1 | 111628 | 132 | 477 | 0.105 | 0.011 | 0.401 | 0.144 |
| 8-45.5 | 26720 | 37 | 382 | 0.109 | 0.043 | 0.459 | 0.282 |
| 8-47.9 | 104862 | 106 | 451 | 0.152 | 0.143 | 0.011 | 0.276 |
| 8-53.9 | 27361 | 38 | 383 | 0.798 | 0.947 | 0.378 | 0.048 |
| 8-53.9 | 145200 | 142 | 487 | 0.260 | 0.129 | 0.033 | 0.016 |
| 8-55.7 | 23091 | 171 | — | 0.040 | 0.183 | 0.069 | 0.872 |
| 8-59.3 | 77568 | 179 | — | 0.003 | 0.258 | 4.4E−5 | 0.249 |
| 8-64 | 110148 | 127 | 472 | 0.005 | 0.085 | 0.005 | 0.528 |
| 8-65.8 | 104389 | 103 | 448 | 0.001 | 0.117 | 0.004 | 0.415 |
| 8-66.6 | 21895 | 170 | — | 0.003 | 0.143 | 0.002 | 0.417 |
| 8-67.4 | 48562 | 83 | 428 | 0.006 | 0.081 | 0.005 | 0.416 |
| 8-68.4 | 82295 | 100 | 445 | 0.003 | 0.311 | 4.9E−4 | 0.067 |
| 8-85.9 | 110684 | 128 | 473 | 0.039 | 0.588 | 0.030 | 0.082 |
| 8-87.5 | 9759 | 17 | 362 | 0.473 | 0.574 | 0.010 | 0.353 |
| 8-105.5 | 107286 | 115 | 460 | 0.028 | 0.063 | 0.104 | 0.076 |
| 8-106.8 | 13100 | 21 | 366 | 0.030 | 0.068 | 0.107 | 0.043 |
| 8-117.3 | 145077 | 141 | 486 | 0.006 | 0.009 | 0.055 | 0.192 |
| 8-117.3 | 145298 | 144 | 486 | 0.005 | 0.004 | 0.076 | 0.210 |
| 9-20.5 | 58904 | 178 | — | 0.578 | 0.351 | 0.078 | 0.041 |
| 9-80 | 29745 | 40 | 385 | 0.182 | 0.025 | 0.538 | 0.116 |
| 9-93.8 | 110377 | 183 | — | 0.021 | 0.097 | 0.019 | 0.134 |
| 9-93.8 | 113113 | 134 | 479 | 0.022 | 0.098 | 0.026 | 0.290 |
| 9-94 | 25961 | 173 | — | 0.058 | 0.047 | 0.039 | 0.177 |
| 9-94.5 | 148621 | 152 | 495 | 0.060 | 0.300 | 0.030 | 0.066 |
| 9-100.6 | 20048 | 29 | 374 | 0.034 | 0.137 | 0.155 | 0.156 |
| 9-100.6 | 153427 | 157 | 500 | 0.022 | 0.154 | 0.092 | 0.101 |
| 9-110.3 | 8937 | 13 | 358 | 0.014 | 0.652 | 0.035 | 0.233 |
| 9-125.2 | 9555 | 15 | 360 | 0.419 | 0.270 | 0.307 | 0.049 |
| 9-137.2 | 36022 | 60 | 405 | 0.136 | 0.014 | 0.290 | 0.096 |
| 10-52.7 | 143754 | 139 | 484 | 0.608 | 0.127 | 0.648 | 0.044 |
| 10-56.1 | 39275 | 72 | 417 | 0.061 | 0.019 | 0.054 | 0.085 |
| 10-89.6 | 106742 | 111 | 456 | 0.064 | 0.105 | 0.035 | 0.088 |
| 10-93.2 | 143657 | 138 | 483 | 0.560 | 0.046 | 0.790 | 0.186 |
| 10-93.2 | 145800 | 145 | 489 | 0.551 | 0.030 | 0.793 | 0.190 |
| 10-100.9 | 109666 | 125 | 470 | 0.083 | 0.007 | 0.144 | 0.148 |
| unmapped | 152577 | 158 | 501 | 0.315 | 0.001 | 0.627 | 0.914 |
| unmapped | 20742 | 30 | 375 | 0.425 | 0.141 | 0.435 | 0.041 |

### EXAMPLE 2

[0210] This example illustrates the preparation of a transgenic plant with a DNA construct for altered expression of an oil-associated gene.

[0211] Coding sequences of oil-associated genes are amplified by PCR prior to insertion in a GATEWAY™ Destination plant expression vector, as described in the detailed description. Primers for PCR amplification are designed at or near the start and stop codons of the coding sequence, in order to eliminate most of the 5′ and 3′ untranslated regions. PCR products are tailed with attB 1 and attB2 sequences in order to allow cloning by recombination into GATEWAY™ vectors (Invitrogen Life Technologies, Carlsbad, Calif.).

[0212] Corn callus is transformed by Agrobacterium-mediated methods well known in the art and regenerated to produce transgenic plants. Corn plants are grown in the greenhouse to maturity and reciprocal pollinations are made. Seed is collected from plants and used for further breeding activities. Tissue from the transgenic plant is assayed to verify the presence of the DNA construct and oil level in seed is measured to verify enhanced oil level.

### EXAMPLE 3

[0213] Homologs

[0214] A BLAST searchable “All Protein Database” was constructed of known protein sequences of plants and bacteria using a proprietary sequence database and the National Center for Biotechnology Information (NCBI) non-redundant amino acid database (nr.aa), which was filtered to contain only plants and bacteria based on NCBI division classification of sequences. A “Maize Protein Database” was constructed of known protein sequences of maize; it is a subset of the All Protein Database based on the NCBI taxonomy ID for maize.

[0215] The All Protein Database was queried using genomic DNA sequences of the oil-associated genes using “blastx” with E-value cutoff of 1e-8. Up to 200 top hits were kept and separated by organism names. For each organism other than maize, a list was kept for the hits from maize itself with a more significant E-value than the best hit of the organism. The list contains likely duplicated genes of the oil-associated gene and is referred as the Core List. Another list was kept for all the hits from each organism, sorted by the E-value, and is referred to as the Hit List

[0216] The Maize Protein Database was queried using DNA sequence of the oil-associated genes using “blastx” with E-value cutoff of 1e-4. Up to 200 top hits were kept. A BLAST searchable database was constructed based on these hits and is referred to as “SubDB,” which was queried with each sequence in the Hit List using “blastp” with E-value cutoff of 1e-8. The hit with best E-value was compared with the Core List of the corresponding organism. The hit was deemed a likely ortholog if it belonged to the Core List, otherwise it was deemed not a likely ortholog and there was no further search of sequences in the Hit List for the same organism. The above process was applied using the DNA sequences of the 186 amplicon of maize oil markers. 1955 likely orthologs from 357 distinct organisms were identified and reported by amino acid sequences of SEQ ID NO:505 to SEQ ID NO:2459. These 1955 likely orthologs are reported in Table 1 as homologs to 120 of the oil-associated genes.

[0217] All of the compositions and methods disclosed and claimed herein can be made and executed without undue experimentation in light of the present disclosure. Although the compositions and methods of this invention have been described in terms of preferred embodiments, it will be apparent to those of skill in the art that variations may be applied to the compositions and methods and in the steps or in the sequence of steps of the methods described herein without departing from the concept, spirit and scope of the invention. More specifically, it will be apparent that certain agents that are both chemically and physiologically related may be substituted for the agents described herein while the same or similar results would be achieved. All such similar substitutes and modifications apparent to those skilled in the art are deemed to be within the spirit, scope and concept of the invention as defined by the appended claims.

[0218] All publications and patent applications cited herein are incorporated by reference in their entirely to the same extent as if each individual publication or patent application was specifically and individually indicated to be incorporated by reference.

The application's sequence listing, which the Patent Office published only in electronic form, follows.

SEQUENCE LISTING (2459 sequences)

SEQ ID NO: 1 - DNA, 458 bp, Zea mays
actaagctgtacatggacagcctcaaggagcccggcgactcggggaagccctactccgcgcggtacatcggcagcctcgtcggcgacttccaccgcactctgctctacggagggatctacgggtaccccagggacaagaagagcaagaacggcaagctgcggcttctctacgagtgcgcccccatgagcttcatcgtcgagcaggccggtggcaagggctctgacggccaccagagaattcttgacatcacacctacagaggtatcaaactacttgatcttgaatgtagaactgtgtccagctgatagattaaccagtttgcgtcgtgcagatccaccaaagagtgcctctgtacattgggagcgtggaggaagtggacaaggtggagaaattcctggcttgaatgccagagcctctctcatcagatggactcccgaagacatcaagtttagggagga

SEQ ID NO: 2 - DNA, 534 bp, Zea mays
caatttataacyaggaatctmttcttctgtttgctctatagccaatgcttgtgttactgctctaaatggtttgctgctgtaagattgggtactracaacaagatccattttttggatgtgcagagccaccttatggccgagtctatttctgagctacagaagaaggtaactaaagctgaaaaaactttcaaggcagttgcactcaggcttrcaaaakaaaacagcacttgagtttgagtggccatttacctgctgatgatttgtggttcagaatgctctgcatctgaacagccatcaacagtagattgatcattgcagaaatgactgttggtactgctgtggtgtgcaggagaggtcactgcaggaggagaacaaggctctgcagaaggaagtaagctgccagagactgactgcaccctaaaccattgcattggcaacagaagggtttgatgtgtgtctcctctttttgtgtagcttgcggagaggcagaaggccgtcgcgagccggcagcagcaggtgcagtgggaccagcag

SEQ ID NO: 3 - DNA, 707 bp, Zea mays
agctactacaaatgtacaaacccgggctgttcagtgcgcaagcatgtggaaagagcatcgcacgatctgaaatcagtcatcacaacgtatgagggaaagcacaaccatgaagttccagcagccagaaatagtgggcaaggcagttccagcgctccatctgcatcacaagctggtggttctcaccgtaggcaagaacctgcacaggccagctttgctcactttggtacggcttctttcagctcgttcggtctcccaccgagtggtcagttgggaccaacaactggcaatttcggcttcgggatggttcccccaggcatgacgatcccagtgccctctctaggatcacttgcccctgtaaagatggttggaaattcatcagctatgcagggctacccagggcttatggtgccgggagaaccaaaggtagagcctgtctcgcaaccactcatccaaatggcaaatgcatctccaccagcttaccaacagatattgagcaggcctcctttcggtcaccagatgtaaataataggaaagagaaaggggataatagatttgcttcagcttgtatacatgatagctacgctgcaacatggctttagtgttcatggatcgtccaattttttatttctattttatttttctgcccacgcatgtctttgaagcaaaaaatgctgaagatgataccctgtcgtgccttgtgtaatcac

SEQ ID NO: 4 - DNA, 701 bp, Zea mays
tgcatgcctgcagaatccttgggttggaatcgtcaatcgctcacaagcagatattaataggaaggttgacatgatttcagcgagggaaaaagaaagggaatattttgaaacaagtcctgactatgctcatttatcaagtcgtatgggttctggatatcttgctaagcttctttctcaggtaactttaaagctcatttctcggacttatatatatctgagcaaaataacatattcagtaactctattacaacatttcagcatcttgaatctgttatcaaagcacacattcctagtatcacagcgacaatcaacaaaactatagacgaacttgaatcagagctggacatcatagggagagctgtggctgctgatccaggggttagtcagttatatcatatttagacaatcgaaataatcatgactgtattttctctcaatcccctggttctgaattataagtcattccaacttttttggagaatcgaagcatatcaagtttgaccaaatttatataataaaataataatatttatgatattaaataaacgtcattgtattctttattcattatatttttatagtatatctatttaatgtcataattcttcataattctcatataatttttcggcaaccttgagatgctttgaccctctaagagagttggaatgacttataatttgaaatccaggtaatatcag

SEQ ID NO: 5 - DNA, 810 bp, Zea mays
aaactgaagacttctgtatacgtcttcgcgctcgtcgttgctgttttcatgtacattgtcgttcacatcttgctgtccttcgacaaaatggcacgggtcatgaagaggactggagaacagtgggttccatgtctgaagaagatgtgggcactcattgaaactgaacctccaaaccatcagccatcttcagaggaaccatgagaggctgacccttggctgtatgcttgtattgtgattacatgaattgttcaattgatatgtacctaagtaccttagaatcaatatttgttttccccacttgtttaaggttgaagtgttgtaatctttttatgcacttacagataagatgcattcatccaagagggttagcttcaagtacttcgttcttggttttaactttctcagtatattggacggccggaactacttatttgtagctacctctagcagtctttctctttattctgtaaatagtgcagtctaaagtgtataatagtacaaaatagtgttttctatggtcatatacacgatctactggccacaacctaaggtgggcaagttccgtttgaagaaaaggggagccgtttgagatgacaatatgatctgaattttacactatagagtttaatgattagatcgtggtaggatcgcgctttatttctatttcatttttaactaaaacttatttaaggttctaaaaaaattgggaaaaaaacattttgaattgcaatccattaatgggccggtttgttttcacgtcgggaacccaagttgaccagcctcttggcccttgtaaaactttttttttcg

SEQ ID NO: 6 - DNA, 774 bp, Zea mays
ttgcatgcctgcagcagaacgcgctgtccggcccgataccgcgcggcctcgccggcttggcgagcctccaggcgctcgcgctcgccggcaaccagctcacgggcgcgataccgccggagctcgggacgctcgcggggctccagaagctcaaccttgggaacaactcgctggtgggcgccataccgccggagctcggcgcgctcggcgagctccagtacctcaacctcatgaataatcgcctcaccggccgcgtcccgcgcacgctcgccgcgctctcgcgcgtgcacacgatcgacctgtccggcaacatgctctctggtgcgctgcccgccgagctcggccgcctgccgcagcttactttcttggtgctatccgacaaccaactcaccggcagcgtccccggcgacctgtgcggcggcgatgaagcggagtccagtagcatcgagcaccttatgctctcgatgaacaacttcaccggggagataccggaggggctctcgcggtgccgagcgctgacacagctcggcctggcgaacaacagcctctccggcgttatccccgccgcgctcggcgagctcggcaacctgacggatctggtccttaacaacaacagcctctccggcgagctgccgccagagctcttcaacctcactgagctccagacactggcattgtatcacaacaagctctccggtcgcctgccggacgccatcggccgtcttgtgaacctggaggagctgtacctgtacgagaaccagttcaccggcgagatac

SEQ ID NO: 7 - DNA, 1448 bp, Zea mays
ggatcctctatagtcgtcctgcagctgcacacatactagccttgtgaatgatgggcggcggtattttcataacatgactcatgtatacagtataagccctaggattgagcattatggttgtatggttgacctgttgagtcgtgcgggattgctggaggaggctcatcagctgattggtgacatgccaatgctggcaaatgccgttgtatggggagcacgcctcggtggttgcaagatccatcggaatgctgaccttgctgaatatgtgctgaagcagctcatccgactggagccatggaattctgggaactatgtcatgctttctaacatttactcgaacagtggaagatgggaagatgctgcaaagcttatgttggaaatgaaggcaaaggggattgagaaggtcgctgcctctagctgggttgagcttgatgataaggtccacaagttctatgttggggacgattcacatcctctttcagataagatctatgcaaagcttgatgaattgggccacggcataccttgtagattgagcccatagcagcccatatttgaagaaaaaacaaaagaaaaagagcccaacacgtaacaagcaacatctcgcattgattttgaagcgtgagaatctggtctgcttattctgttcgctgtgtttttttcgttccactcagcttttcgcagccgccgttttacgttagccaattctgctgtcagcttgccgctgtccgctcgtcctttgagctttggtaggtactaacttgaatactagatgcatgcttctttgattcaccaccatttatcatcagaatgtcataatattgtaggtccaaattatcgtctctagtagaacaacgccggtaaattatgtcaatcatgcaacaaccgccgtgcttactattttttttactttaagtatatataatcttaggaaatactgttgtcctaccatgaatagcgctctggtgactagctaaacatgctattagaatataataaataatatatcgatctactatatctatatgtgtgcaatctgttttatatatattttagattacatatatttaaactatacttatattgtattctgtgctggtttgtcaggttgtgtctcccaaatatcttgcctttttgttgcattggactcttctgtggttagaatggcagcacccaagcccatttctcgtcttatttctcacgtcattcttgatttggatggcaccctcttaaacacaggtgacttaaaacttggaaacaactatgattaatggttttttgaggtttagtgtactgaattcacctatctgagctgacttcgattctcttgtcgactctatgtggcagattctgttgtaagtaaggtagtaaaaccatttattctaaagaatggaaaaacgtgggatagcaagaaagctcacaagctagttgggaagacaccttatgaa

SEQ ID NO: 8 - DNA, 709 bp, Zea mays
acaatataacaagttagcgacacaagttttgtacttcaagtcttttaactatatgttggtgcaataagattatgagtaatccatatgaaggtgttgcaagcgaatatgaaaggcaaagataaacggatgaacccattactagctttggctgtatcagaccaataacttgaaatgcacttgtgctagcatgcctaagtattagaaaaggtagcatgggagaatctatattattttggctaacttctttagttactattgattgatgagaaagcctaccattgcccatgccagccctaatgtcccggtgacatgattgagccagtactatgattaatttactctattgttctccttttttgagtgctgtataagatgtcctttttttgagccactcgagaagatgtttacttaactctagtgcgcaatgattggagctctcagtgcaacgcatgtgctctgtaatctactgtcaccactaccctgtagtgtgtgcttaaactctaaactattccacgtggctagtaattaccaatcatttacaacactgttacatgtgtagggctgcgatgcttcggtgctgttggacaacagcagcagcatagttagtgagaaagggtccaacccgaacaggaactccctcaaggggtgggaggcgatcgaccacataaaggctggtcttgaagctgactggccaggcacaagattctgt

SEQ ID NO: 9 - DNA, 691 bp, Zea mays
aggatccttgacgatcttgctcctcctcatctgcttcctcacccgcacagcccttccatgccgtcccttggacgcgtacatgttcgacaagagcacgtggtccccggcctcgccaccgccgctgtccgccgccaccacgacgcgccgcatcacccgctcggctctctcgacgttgccgcgcgcgcggcaggccgcgaggagggaacctcggacgagcgcgtcgggtggcacgggcatcgccgcggcgagcgcctccgcctcgtccagcctccccgcgcggccgagcatgtcgatggcgcacccgtagtgctcgatgccaggcgccacgccgtaggcctccgccatggcgccgaggtgatggaggccctcgtcgacgagcccggcgtggcagcaagcggagaggacgccgaggagcgtcacgccgttcggccgcacgccggttcgccgcatggccgcgaatagcgctagggcctcctcggcgcggccgtgggtggccaaccccgcgatcatcgacccgtaggtgtacacgtcgcgcagcgccatgccgtcgaacactatcatggcctggtccaccgcgccacacttggcgtacatgtagagcagggcgttactaacaacgccgccggcgtcggcgtgacgctcccagctgccggcgcatgtacgcgtgcacccaccgttcggtgttcagagc

SEQ ID NO: 10 - DNA, 696 bp, Zea mays
ttgcttacgaagattgaatttggtatgtgcttctgaagttcttcaattatatattttggaagtgcacatcttgggagggctttagaaggacctgcatatttgttatcaagtaaaaaaaacatataaagcgatctcattgcagctgtccggggagacaactagcaatatgtccgaagaagctcatttatagtcctactgctattagtatcacagaaaatgttctaaatagcatggtaaactaggatataaaagaatggaccaagttaatagccataacaagctccatattaaatagaaaatagattacaaatctggatataggagtgcatcgagcttgtggatgtgaacagctatcagctcagtgtgtcactaagttttggagtacctgcatcatcaggtccaggaatgaataagaaacgactatgttcctttaatctagatcgagctgcaatcatctcgccaagctttccgaactgaaatctgtgtggaggtacatagctaagggttatctcatactggaatagcaagaacaaaaagacatacaattctctggcatctctaatgaaacagaaagccgcacctgagttcttcaaatgaattgaacgctagattgcaaggccgggagcagaaattgcccattaaaacaaagagggaggcacaacttccacactatcatacccgtcaagaacaacagcc

SEQ ID NO: 11 - DNA, 697 bp, Zea mays
taatgtaactggggtgaataatcagcaaagcagtgagcgcacatgtgtgtagtagtggtgaactggtggggcgtggagcactaattagactgcttgagtttggatcatacatatccaaatccagtaacaacacgtagtggcctttcttctgtccattcagtcatctttagcaaatcttccatagtatgtatgttctcaaaaatgccttccttaggtacctggtcgcacaagttgactgcttcagatataaacttcaatttgaaataacaagactagtacctatgaatcctcctggataccaacataccgcaagggacaaacgacaatgtccaaactcaagagcatcatgaacaaccactaaatcctcattgccctgacacaaaaaatttaagcacatcggtcagataaaggcttcttcaaagcagaatagagcagacccagtgtcagaggctctggggaagggataaaccgatgcaagcctttccccacgaatgtggagaggctgcttcgaacctgcgacctggtgacttagtgagaaagctagcaccactgcaccaggcctaaaatttcacataaaagaatattgcggattcgattggaagagattaatgttttataatatataggtccagaacccaatgtgcgcacaaaccaggaaggcattagtctaagcacaagataaaccagatataacaaa

SEQ ID NO: 12 - DNA, 739 bp, Zea mays
gtgaatcttaaaagcactgaagttatcgaacatccatatgtccaggtaatagcagttcaactgctccagtttgactaatattccctgttttatttggagtgctaagtctctcttttgctcctattcagatatttaatgaaggacatcaaaatgttcttgtagagatgttggaaatcataacagtaatttgtgaagagctcaaactacccatagctcagacttgggtgccatgcaaataccaaaatttattgatacattgtggtggtgaaaataagagttgcttcgatattcatgaaagttgtgcccaagaactatgcatgtcaacaagtgctgttatgtttcatattatcgatgctcatatgtggggcttccgagatgcctgtgtagagcaccacctgaagaagggacaaggggtttctggaaaggcttttatcctacgtaggccttgctttacgaaagatgttactagattctctaaaatggagtacccccttgttcactatgctcgtatgtttggattagctggctgtttttcgatatgcttgcaaagtgcttataatagaaatgaggactatgtattggagttcttcttgccacctgattgtagagaagatggtgagcaaaaagttcttttggactccatcttagctctgctgagacagtatcttaatagattgcaggtagccactgacgaaggctcaaatgaagtttaccttcaagtcgatgctattactataaa

SEQ ID NO: 13 - DNA, 768 bp, Zea mays
  misc_feature (731)..(731): n is a, c, g, or t
gcataaacggctcatgaacggctcatgaaacaaagtctacatggttcagaacccagatctggcccaaaagaacccaaatcagaattggcaggggccaggcgccggaactgtagacttcataaatcaggaacccagatatgggaaaaagttttaaaattacatgatttttgtaacaaagtacagactatatggatcagaaaccctgatctggatcaagaagcagcaaaccgagatctgaactgatcaagaagcagcaaaccgagacctgaactgcgtcgcgtaccccatctaccacaaattatgacgtccactctcccacttggggagatggtaagccaacgcatccaccaagtgcaatgtgggccattgatctaggccacgggccttcttgatagccagtcgaccccgtccaggtaagtatgttgcaaagtaggcaggggcactgcttatgtagcctcctcacgcgtcgcacccatcttcaggcggcgaggtgggactaaccgaaacgtgcctcacccagtcaccctgtcgctcgagcgctggaagtgggcgagcgctcgttattttgcagagcccataaacgaaagcccatgaaatcttccgactcgtgcgcgccaaccttttttgtgctcgctcaccgaccggcgccatcactcgctgaaatttcttttcccaatccagttcattctgccgctctccaatagtccaatccggtcgcggcgaagctcggncagacgggcaccccaatgccgtcacggtcgggctccc

SEQ ID NO: 14 - DNA, 804 bp, Zea mays
acttgctgtttgcaggcaactcgagctccttgacatatataataattccttcaccgggccactcccagaccaggtggggaacctgtcaacatatctaattgaatttagagcaaatgcaaacaagctatccggtgagcttccgtcgtcattgtcaaacttaagcagccttgttagtatctattttcacgacaacctactcacaggagccataccagaatccatcacacgtttacaaaatctcatcctgtttgatgtcgccagcaaccaaatgtcaggtcgtctcccaacacaaattggcaagctcaagagcctacaacaattctacaccaatggaaacaaattctatggccccatacctgacagcatcggcaaccttacgtcgatagaatacatctacttgtccgataatcagttaaattcaacagtaccatctagcttgttccagcttcccaaacttatctatctggatctttctcataattccctcactggttcactaccggtcgacgttagtgggctaaaacaagtggattttgttgacttatcttccaattatttgtttggaagcatcccagagtcatttggaacacttaagatgctcacttacctagatctatcattcaactcattggagggctcaatcccagtttgtttcaggagctagaaagcttggcatcattgaacctctcctccaactctttctctggtacaattcctcagttccttgccaatttcacctacttgacagacttgaatctgtctttcaatcgactagaaagaaaggtacccgagggaggtgttttc

SEQ ID NO: 15 - DNA, 717 bp, Zea mays
actcagctgtccctttgagatacatttctattattttctctagactagaacctgcttgtgtatgaaaaaaaaaactcggtacttctgtgttggttgacataaatttcttctgaaactctgttctcaaatgctctgaacctgataaaaatcccttgtttgtgctaccttgtgatttgttagccttgaaaatatctgtcaatactctgttgtcttcatctgtgctggtacctccaaatcttgttcccagcagcaaaaacaaattatatataaaaaagcacgtttaggcactctagacgctaggccaccagtggcctagtgcctatcggatttttgaacatgacaatactccacagatatgaaatcaactgaaatgactataaaaatttacttttccctgtgcacgcatccccaacaaggaaatgatgtcttctaaaattaaattgtttttttcagcttacatgtgatgaaacttccaaagaggcaataacaatgacgaccttatactggcagtagtgttacttcacagcgttccacagataaactagagctatatctcatgcttcgaaacctataattcaccctaccaaacgtggtactatgtcatgaccttagtccttagagatcaaatccctccatcaaattcacggataggacacccaacctacatttatgatcaaatctatagatacttagatagctcacccaacctatatttta

SEQ ID NO: 16 - DNA, 702 bp, Zea mays
gagcattcgagctctgttgcggcagtgtccatctgcttgaatgtatcttggacctgtgaccacagttttccagcccgtatctaataaaaagcaaacagaaggttagtgaaacataagcactctgataacatgctattgaattgtcaacaattttgtttcaatgaataagggagcaaattcggtcaggaaaacagcaagagctaacaatactagtttgcagcagccagtggcagacctaggattttacaggagggcatgccatgcattttgataaacttgtttagcgattcggtttcaaggctctcttgggaatgatcttgatcaggttgaaagcatgctctgcaattggttatccaaaaagccagtgagaaagtttcattaccaactgtggtttgtacagcaacaccaacaacgtttgggcaatataagggccttgcactggtaaacctgcccaaacatgttcctcatcaatcttccgtgcccacagccatctgatacggagtgaccagccgaaagtttcaaggttatgaatgcctagctccccaaactgaatagggaattgaaccttttcgcacgagactagacagttaccccaaagaaacctgtcttttcttatcaataacttgtaacactcattttgataaatccatggcaaccacaagataaaacaggatagcatggagcaccgcccttagtttgggg

SEQ ID NO: 17 - DNA, 615 bp, Zea mays
agagtcgacctgcagaggttcgcctacgactacgagggcaatgttcgcccgctacaacgtcgcgcgcccgcctctgcgcgtggggacctgtcttcagcttgaacgtcttcgccaccgcgcggggacatcgctcagaaaatacgtgcctttgccagcccgtcgtgcaagcaattcacgccagctgacaggcgcgccagcatcatagagcaatgaactaatgatggccaaatttacaacatagcatttatttcgatggcgccaaaaaatgcggattggatttttacacaattgctagcaaagaacaaatcaacatatctcggacgactcacgaaacaaacaaaaaaacacgggcacacgcacaaataaggaatcctctgatcctaaagttgggtatgtacaactaaagttgcagattagagtagtaaccaagctgagttgcgtgtgatgaccctacacgcaatcgtctgatcctccacaccaccactttttttgtgtgtgtttctcatctttctgctcgtttattattttttattatttattgcgatatgagattcggatcattcctggtggatatgaatactgggacaaccctgagcgatgaatcaacggccctgc

SEQ ID NO: 18 - DNA, 798 bp, Zea mays
atcttgcatgcctgcagaaacgttggcaaaatgtaaaaaaatccgctacagctggttttctataggtcacatgtaaggttactaacgtcaaccttaaaacaatttgctgctccactgaatgtgcaactgtgcatggcgatactaataactatacagcaatcaaatcataaagaaagagaaaaacttggacgaacctcaagtgctttgcagactttatcgacctcgcaggcatagtttatcttctttgatgtcattataagttcaacaacagcgatacacgagtgagcggaaggatcaaaaacaggcagagcgactgtaccatggacgttgtagctgatcgcatggttaagtcgttggtactcaccactgctatagtactgcacattcggtgtccactcgggcaccttttgcttatagacacgcccaggtaggcccaggtctccaacattttccgcatcaactgaaaacatgtaggtcatggatacagccctgtactgaagtaggccaatgctctggtggtcaagcacgaaaggctgtcctgaagtagtgagcacatagcggtctccattcttgactggtgcccagacttggaccagcagatgttgatcggtggactccttgaagtagcgaagagcgtgtgtcagcttctccttgaacaagctggagttgactgtgccatcttcgtccagggacagatgaaactgccatctgtgactgatctgttcagctggcttgcttgaagtgtgagaattccctgggtgaaagaagcaagattgtaaggcgaggaacgggatgctg

SEQ ID NO: 19 - DNA, 737 bp, Zea mays
aacaggcatccactgttcagggttttttttgtttgttttttctctagccatttgccaacacagtttgtatgtttcaactaaaaacggattaagaacaccgaatctgctttagcacttcgtcgtggtaaccaataatacgagttctccatggacgagcgtgccccccagcatatatagctctcaccttttcttttttcttccatgccaatcaaatacaagccccacttggcatgcaaatctccatcagtacagccccttgcccacacacacaaactctaccagtctaggagtaacggaagattttcttacctctacgccacgctctcgcccttatcttcgttcatctcttttctttgggagattgagagagggaaaaaaaaagacgacaaaagcatcggcctctcgtaaagacagagacagagagacatcatcgcgaaagggacgggacacgaactgccggccgaaaaatggcccgggccggggccggggccggccagtgggcggatgtgacccggggggggcagttggagaaaggcctgtgcgcgccacacgtaacgggcccatccgtggcgcgtatgccctccgcctcgcccccggcctggcggcgtcctccacccagcgaaagcaaagcaaagcgagagaagaaaaaaaaagaaaggaaaaccgcgaacgaaaaaagtgccccggttcccggtcccaacgttccctaattcgcccttttggttttgtcttgaact

SEQ ID NO: 20 - DNA, 804 bp, Zea mays
tcctcatggagtgctgaagctccagccccacaccagaggctgctggaattggacacaacctccataatagcatggatacacgaccttgcagcatcgaacacacaagcattcctgtgtttccgtaactcccaagcatcagcggaattctacaaaatattcaagattgtgctaagctgtggggtttggctggagcaaaagctcttaaaaggctctggccttaatctaggatttagttcccctgtactttgaggtttggtttttggtgttttagctcagttttttttagtttctgctgccattcattttggcggcttgtacttggtctattttagagctttctgttcttaatatagtgatacacaattctcctgcgtattcgagaagaaaaataactcccaagcgaccaagatgatcaacaaattgagacaatgagacctttcttaaactcctttgaaactctctttgacagtccggctccaccaaccggagaaactattagtgtcaggtaggggggcagcagcctgacagaccaaccctatgcaaaactgatgcccagacctgtctagagaacatacaggaaactaggatgtgctgaattgtttcttcagcttgatcacataacgggcatgctcaggatggggcagtccattttcattaattgaaaacataaacattttcctttctttttgaaactaataaattaaaatgggttgcttttaggtgatggattttgagtggtacagcaatgcctcaaaattggttggaagatttaaataaagtggcaaattattctatggggtttta

SEQ ID NO: 21 - DNA, 771 bp, Zea mays
ttttgtcccggcattcatatgcagatttgccaaatatatggaatggaactgagaagaactcattgtatataaggccacagtatattgagaatattgccatcagaagaataacatatcgtccgccgaatgccaactccataaagctaccaagcttctgaaataagttatgaaccgaaggttacaggaagagattaagtgtgcttgcgcaaacactgtgaaataaatagcaagatgcaaagttcgaattaaggctcctgaaacagacaagcatcactggaagagattacgtgtgtttgtgtacacactgaaataatggcaagaagcaaagttcaaattaaggctcctgaaacagacaagcatcactggagccaaaggggccataaaaaactcttcagtgggtttcctgcatgcttatgtgttttactggattccatttgcattacaggactgattttctgaacttgtgtgtaatcggttatctgccatatttctaaacaggtcctgtgatataacaggttccttttttgcctctgactctatcagaatgaagtataatacgctcaaaaaagattaggagtagattgtttaagaatattctttaggcgctaaaattcctttgtgatatttaatacagtataacataatacatatacatgatttgtttctaatggttaattggttatggtaaagaaagaaagaaaaggaataaagttcagcatcatttacctgagaggaaaatctcttctcgcgaaatataagaaccaaagctct

SEQ ID NO: 22 - DNA, 768 bp, Zea mays
tcccgtatagtcgacctgcaggctcattacaacatagcaagtatgtttgggaatcagaccatggcatgcatgtatgtttgggaattagaacattgtgtacatcatttggaatcatcagcaggaaaaaaagaagaaaaagtaaatgtactgcatgattagagtgataaaaagcaaggaattctccctcccgtgaaaaatagttgtcacatttgtctttgcacggttttgatattttctttcaccaccaatttcttctagaacatattctaaaaattcttgaaatcacgagattttgcaagtattttcaaacaaaaatctagacatatattaacatgtttctaaaccagataaatttgatattgatgtttgtaattttcaagttttcaccagatattatcctaaaacaacatgtatctatgaccaggagtcttttatttattcagagatagtcctaacttgtattttattttctcataaaaataacaaaaacggatgttgctttatttgcaagtagtaaactgaagagcaagtttgactgttaatttgattgaaaatattaatataaaatcacaaatgtcaagccttgcttgatatgaaaagatcaagcaataacgccatctcgtgaaaatttaaatatatagaaaaataaccaagcaattaaagctgcaagtaatacttaatctcctacattaaccgcataatttataactgctctacctggggttgtgccagcatagattccatacccaacatcatctgtgatgaaag

SEQ ID NO: 23 - DNA, 820 bp, Zea mays
ttgcatgcctgcagctctattttgcaagtcgttactgacaacttgtaacaaattgttgtatttacgggcatttttaccatcaaatacaatacaaaaccgcatctttttttttgccattgttgtatttaccatcaaatatgatattaaactgttgtatttacaagcattgttactagtcatagtattccactatgtactcatgccaatttcagtgctaggacttctagcaacttttcctgactacatgttctaattctgtttccggtttatctgcaacaggttgttgaccttgctgagattgattgcaatcatcctattcttcatatggcgtatccggcatccgcatgccgacggaatgtggctctggtggatatccattgtcggagatttctggtttggtgtcacttggttgctaaaccaagttgcgaagctcaaccctaccaagcgtgtcccagacctttccctcttgagacaacagttcgatctccctgatggcaactctaatctccctaggcttgatgtttttatcaacaccgtcgatcccataaacgagcctatgatatacaccatgaactctatcctgtccattcttgccgtagactacccaatcgataggactgctacctacctctcggatgatggagggtccataatccattacgagggcttgcttgagacagcaaatttcgcgacactctgggttccattttgccgaaaacatagcattgagccgagagcccctgagagctattttgctgtgaagtcgcgcccatacactggaaatgtaccagatgagtttgctgatgatcatagacgcatg

SEQ ID NO: 24 - DNA, 775 bp, Zea mays
tctttatcttatataagcatttcattttgaaatgatccatttcccaatgccgaggcacatgcaaactgttttaacttttatgccttacacggttgttttcagacattatgtgctgtacctatttcaggcaatttcaagacgagccaccttatacaagatgataagggattatgaccaagctgctaatgatgtaaggaagctaatctctcttcttgaaaagaaagtcaatgtgtctggagtatcaccaaaagcttttaacaagcacaatgatctcaagcaagcacatgtgaggctttcatccatagaggatgaagcaaaaaatgacacccccctgaatttgtatttaatcttgtaagttgtccaaattggttttacctttttgttccttcagtatgattttcttgccccagtttgtgcctggttgacctgaatatttgtattccttgaaagcaattattgcttatctctgcatttaattttcacctttcattgtagattttactgacccagacaacaaaaatagcattgtttattatatggatacaagtacaaaatatgctgtacttagtagccctttaaggaactacgctcttccatatgtgtgttgcaataacaatgggtttcacaataaatacaaagaaactggcagaaaaatataattttttggaactgtgtagagtgcttttaaacatgatattctgatataacaacatagaatatcttgcgtttgcagcaattacgactcttacttttcagtataagagtggtacctttt

SEQ ID NO: 25 - DNA, 755 bp, Zea mays
aatagaaagtcgatgaaactagcacggaatcagaatatttgttcttttctgactccatcttctcattctgggctaggctgaaattttgaaggactgattggagggattcagcatcatggcgctctgtagaggaaatgctcttgtggctaggctggttgccaccccaggctttcaatattgtgtctgggtttgactcattttccagtgtggggcctaacttatctggtttattttgctgcttcagctgagagagcagggacaaggtgggttggctgttcgtagaagtaagcagcaaagagctatcttccgtcggtttgtttgctttctctctgctcaacattgtcctgaaaatgagtacaaggttgtggaatgggaattattatgactgctaagtggcaactaaaataaaaaaataatattaactagaacctcagcatactaacattattccaggatgcatgctcttaataggatgcacaagtattaaattgggattttattattcagatatcatgctaaaatagggtgccttatataaggagatgactctggtgtaagaatacagtatttacctgtttaaactatctgcccaatagctgacaatgcctggcttggagtcattaacttttgccttcttcaagctaccttgtggcccagcacatggcaatgagccagcagcagcaggcacctccttggtggtcttcttaggttgattttccacaggctttcttgaacgttgacggtttctgttgatg

SEQ ID NO: 26 - DNA, 856 bp, Zea mays
agcttgcatgcctgcagtagcttgcattcttctatacattgtaagttcgcttcccatttggattactggaatgcacatctccttgtatccagaatgtttttgacgattcattttacccataatccaggagtacaagcacattgccaggttgaagctccttcatcttacaagcgcaacaccaaaaccaaaccattttacagttcttgttcgtggaataccaaaggcagataaagaatcatgcagtgatgttgttgataatttcttcacaaagtatcactcatctagttatctcttccatcaagtagtttacaaagtcgggaaagttcagaagataatggtacttaacactcaaatgcatttcactttttctaatgacaagcatttactagtataaacctgtttcttctgttgattagattttcgcacatatggataatcatttttttttgtattttgacatgaatccgtggaaatgtctgcatttgtttttttggtggtggtggagtggaagttatgcatatttctatttcactttatttatgttttttgtgttactttaatcttcatctctgacagactggcgcaaagaaggcatataagaagttcaaacatttcacagatgaaactgtcgatcaaggttgcaggacagttacctaccgctgttgtctgtgtggagcttcttcaaattctttcaagttgttgaacactgagtgtgagcagaacaaggggaaagcggacaataaatccatcttggacttagacgatgaggttaagcttgcatgcatttgttcttttgcttaacctatcagttatttagaataattagtaattatcgtgtgggattgaatgcaggatg

SEQ ID NO: 27 - DNA, 773 bp, Zea mays
  misc_feature (748)..(748): n is a, c, g, or t
gcagaagcttctctaaccttaaaactatcaaaaagaaagacaaaaaaaacaaaagagactccaaacactgtgctgtccatgcatgtttcggattctgtccaaatcttactttcaccaaagctgagcacatttattcctactaccgctggcaagtaagtgaaacgccgattaaaactagatggtgacaccgcgatgaagatcagaaattgtttagcttttgaagaagccggtgggcggtggcacgtagcaagtgaaaacaaatggagattttggaagcacgaacgaaaaggttcacgctaatctgccagttcacacagtaatcatgagcatatttgttctcttccccccgcaaagcaacaaatcgaactccctactcccgagtgcatccaaaaataaagggaagatgcgagagaaaatgcttcacacacggcatgcactactcacctccgccaccatgccactccagggcagcgccgccgccgctggccgggaccagcgccggcggatcgaccttgatgacgtcatgcagctcgcgcagcatcttctcgaggctcgccgcgttctgatgatccggcagcgctgcgccaccacctccatgtgcggtggcggcggccgaggccggcggcgtcggttgggcgtattggtttgaagggagctccaccactctggggcaaggggacggcgagagcggcgggagcctgctctggtcggcgccggcgctgcgcgcgccgtagccgagggacaggtnctgcgtcgtcggggacacgggcgaa

SEQ ID NO: 28 - DNA, 729 bp, Zea mays
tttggaccattttgtttctttgatttagatactgaagcattactgaatatattcataagacaacgccatctgaaaacataacatggcctttgtttaaattttgattttgaccatttcatatggaatattggtttgatcacaaatacatgatcttcacataactcctctaagaatgtgatcttcatgtggaaactgctatcgccatgacttggcagagattgtcgatcttccttcagccatgcttggtgctggacagctggaagcgacaaacagaccaagttgttcatccgatgtcgaagccagaggagtttcaggaaaatcggcttatgtttatgttttattgttatgtcattggacgagtgtgtatcaggataaatgtagaaaaaaagaattttttttcttaaaatttggtcatgtactcaattatttctttgccgcaggaatatcatggagcatatgtgctcttcctggttgatggactggttctacctttactgcctctgcctgagcccccacctcatgcctggtccatctccaggagttcactgtccaccacggcatctgtgcacatggaaacgaccacctcgtgaccgatgtcttacttttacgatcaacactgcatcctcgtaccctgcctgatcaccattccttcgccaatccaaccatgccaatctcatgtctggctggagagtggagataagtgggagggttgcaccaccaattccttga

SEQ ID NO: 29 - DNA, 763 bp, Zea mays
attttgcaatgcttgtcctgttttctttgcctcagtaagttgtatctttgtatattttgctttgccagatacaggctgtaaaatgtaggcatgctttttcgaagcagatctggaaccatcctgctcctgaaactcaaaaacctgaaaatgtagtttacaaaccaataaatatttgttaggttgctggatgcaagcaacagaagaataaaagatcccaacaaaacctcattacagcactgcgtctattcacactctaccacatgttttttcaaacagaaattgacaaaggtaattgtctccatgccaatttattctctcaaacccagggtatttatttgcgcacaaacaaaattgggaggcacctgactccactctgatggaagtaaatcctcccagggtttatccacaatccaaggactgctatcagagtcaaaatacaccgccagactctcaagttcaacagactgcaaaatgccaagttaaagaagtcacgcaaattgatcaaaagtaaaaaaggtcaaactaaaacaaataagcacaccaaatgtgaaaaatgcttgatgtgtgaagcgaaaagaattcattactaggtcctgaaaactttaaatcaaattaattgatcgccaaaattagaaaataaaaaatgagctattgttattttttactttcaaatctaatattcgactaagtagacaatgagcaatcaccatttcttggagatggaagatagatttatcaaggaaatgccagaagaataggcatt

SEQ ID NO: 30 - DNA, 634 bp, Zea mays
atctcgaggcgccgccgcatcatggtttgaacggctgtgtgctgacgctaattgcgctttcttgcaggcggctggggatcgcgacggcgctggtggagcgcgcggaggagtggtggcgtgagcgcggtgcggcgcacgcgacgatggcgacgaccacgtccaacgcggcgtcactggcgctgttcacgggccggttcgggtacacgccgttccggcggccggagttcctgggaaggccggtgcacgcgcaccgcctgcccatcccgagcgcgcaccgcgtgttccagctgccgccgccgctggcggccgcggcctacgcgcgcctgtccccgccgcaggccacggagttcctccccgccgacatgccggcgctgctggcccacaagctcacgctgggcacgttcgtggccgtcgagagcggcccgccggagccggaccagtccgcgcccccgtccttcgccgtgctcagcgtctgggactccacccgctccatgcgcctccgcgtgcgcggcgcgcgcgcgctgctccgcgcgtcgctcgccgcgctcagggcgctcgaccgtggcgcgccgtggatgcgcgtcccctccgtcccggacatttttccgcccctttggcgcctaccttcttttcg

SEQ ID NO: 31 - DNA, 789 bp, Zea mays
aggctcaacaatgaccactgagggcactgaagtcgcttgatgtgctgaattgttcgtgatgttggtggcgtattttgtttaaataagtaagcatggctgtgattttatcatatgatcgatctttggggttttatttaacacattgtaaaatgtgtatctattaataactcaatgtataagatgtgttcattcttcggttgccatagatctgcttatttgacctgtgatgttttgactcccaaaaccaaaatcacaactcaataaactcatggaatatgtccacctgtttcttgaagagttcatctaccattccagttggcatttatcagtgttgcagcggcgctgtgctttgtaacataacaattgttcaggcattatatccaaatctagaggcctaccaaaatgagataacaagccaactaatctgctgggaaataggtaacaagtctctaacaagatcttaagcttattctgagatgatgtcgagaccgatgccttttgttacgtcgtgccgtgcctcttgttgccatgctggtaagttgctgcctcttgatgagggcaagctgcttatcaaggcgggatgaagtgttatggacgcaggcatgggtgctgctagcttggcatccagggttccaggataacccatctacctgcattagtttgtttagtttcttaactgctaagttggcagatcaagttagttagacaagattgctagtttcctgcttggtttgtagttcatcatgtacgaaggccaggcttatgtatgccaagtgtattaatgtgtta

SEQ ID NO: 32 - DNA, 688 bp, Zea mays
atcttcgctgggttctccaccatggatcgtccaacgcgccttgtgcacctcgccattgcgggcttctccctccggattgcatgtttggctgtggtcgctgtcttcgtgctggcggcgtaccttgccttcgctccaatcgatccgcacatcgccgctgcggcatgtgtgctcccgcttctcgcggtttcgccgcaactcctcacacccttcatcatcctggtactccatgaacaggcacttcttagaaggcttttccaaaagcacgcatcgcccaaacttcgcattgcattgcaagtcgcaaggggattcttccagaaccacatatctccaatagtcggatgtatcaaagccaagctcccacaaagcctctcagccatcataacagatctagttcccagacttaacagttgctgcgtcagatcctcaatttttgtatgcttagcccctattttggcagctatcttaacagtggctacggtgattggcgtcattgccatcatctgcggcattattgctgctatagttttcgctataatccacttcgttactgattaagtgttttcgatcataatagatgtgcttattgtaataaatcgtatttttaacttgctctcaaaataatagaaacatcatttgttttgaattacttaaagatggatgtatattgtatagtccgttctgaatcaga

SEQ ID NO: 33 - DNA, 729 bp, Zea mays
gtcgaacgagtctgtcttcagctcaggaaccacaacggacagaatcggcatggatggcctatacttggctacaagcctagcagtagttcctcccctggtcaggaccaagataagtgctgccctggcagagtttgctgtgcgaacagctgatgatgcaaggctctccaatggactcattggaattggagctgaagccatgattgatttgaaaatagcagcatggtctacgcaagactctgcttgcaggcagatcttagccatagtctgcaccgccaactctggataggccccagcagcagtctcaccactgagcataacacagtctgtgccatcaagaactgcgtttgcaacatccgttgcttctgcccgagtagggcgaggagacttgatcatagattccaacatctgggttgcagtcacaacaggcttgccttgaatattgcacttgaaaatcatcaccttctgtgcaaagaaaatcttctctataggaatttccatccctaaatcacctcttgccaccataaaagcatcagagtttgccaggatatcatcaaagttagctactccctcttgattctcaacctgcatgttcaaaactattataaccttgaatttgaaaatctactagtttgaaacccaaaagaaaatgctagaaccatacctttgacatcagcattatggacttggcatgctcaccaagtaccttcctaacctccacaagatccgaac

SEQ ID NO: 34 - DNA, 847 bp, Zea mays
ttcttgcatgcctgcagtggcgcatgcatgcgcagaagagcagccgctacaaccaatccagacgatgtcgtcgggatctagtcatctttttcttctcagtaatgcatggcgattattacgccactgttcacacctgcacacatgatcggatcgtccgaggctttctgggttcctacgtcagttggtagtatttggctagctagctagctagctagcttgtgtttgaggaaacgtaggacgtcgtcctagctaataacatctcactttctgtttcgctccctcctttctccccatatgattgatctttacctactgctgcacacacacgccttttgcttccatgcctgttctcagcagccaccgtctctgggctaggctcttgctgtttgtttaaggaatagacatggcatgtcaagtgagctgacagccttgttggccggactggactttgtgaggcagatgccctcctaacccaaacctccccagtctccactgcaactgcaactagctaggcctgagcaggtcgatgtggacagagcgagcgcgcgcgcgacagcaaaccgacgagaaagaggcgatgggtggggcttggcttgcttgtgatagggggaggattctgcctttgcgggttcctacttgtggtctggcattgcattgcattgcatgcctcctgatgccaacccttcgtgttttgggttgtgttaattcctgtcaacacctgcatgattgcgctgcggcgtacgtgtggaccatacggtgctgcttctttggcttgtaagaggtgaaggggacctgttgcttgggcaggcctagctaaccctgtccccatttcgagatcaagcgtaaa

SEQ ID NO: 35 - DNA, 816 bp, Zea mays
caaatataagcttttgacttgttagctacaaagtctaaagggatgacactaaaatatatactcaacttaccagcgagatgtttcatagggattccagcaaatgcaagagcagcacaagaagcattaattgcacatggcataagctaagcactgtcaaggaaacaaggactagcttcgattgaaaaaagaagctactcatattttgagttaaaaggtcttggagtacgcatgatgttttggcaacaaactacatttcaaggaagagccaaagatatccgacaaagattcaactctctctaattccaagcctagttgatgtgaccgattcgctcatgccttcatgcattattccctataagttaccacctaattgatcctagcaaatttatccaaaaaaccattagctaacagtcagtagactaaaatttgaagctttaatattgaatgcaggacaacaaacgcaataaacataaaagcagtcaaactatattactgctacatcatgtggaaagatacagaaccatcatcacccacaacctgcaatagcaagattaacaatggataagtgacatttagtggtatgagcacggacaacggtagccaacataagagaatgtacaatgggtgtgcttagagatgatgattagccaaaaaaaccttttggaagtggggatcctatcctagtaattattgtacctcccatcagtactataagttgttcattagttcacataagcacatcaagtctgcacccctggagatgcactgagaaagctagttattaaggttaaaataagggaactgagaagtgcattt

SEQ ID NO: 36 - DNA, 677 bp, Zea mays
atgaggaatcattaactggaggatcatttgatgaaggaaatatggtcaagaacattgaagcctgtgactggttaaccagtgctataaagaacctagaagcgtccaacatagacccaatctatgtaaagttgcgtgctgtaggttccctctcttcgtacaaatagcatttgttttcgtattgaaggtttacatacctgagatttttgttaatattacaaatcagtggaccttaacttagatacacagttagatgcatagtttttcgggatgcatagtttttactatgcacttagatatacactatatctagatacacaacaaaagcaatgtatatagaaaaccaaaatgtcttataatttgaaatggcatgagtatctattagtatgctgctctggtagaacttgaaggatttttttatgacatggaaaggtggatatattgagtagaaaaaagaagaaatttccccataacaacaataaagacttttagttccaagcaagttaggttaggctggagttgaaatccaacataaacgacaaatcaaggtttaggtatatggacaactgttttttatgtattcctattcaaggctaaatctttcggtatattccattctttcaagtctccttttactgtcttttctatatcaatttcgatcttctcctgtctctcttctc

SEQ ID NO: 37 - DNA, 748 bp, Zea mays
atcatttttcaaccaagtaatggagatcgctttttatttttagtatgtcgcatcgttggctagagctttgatctaccttcatggcaagcatgttatccatcgggacattaaaccagagaatcttttagttggagttcaggtacttgcattgtgttcttttttggtatccctctggcaccgggtctgctctgcctcatctggaagactggaactatatgcttgctttacatcgtcgtctgtttccttggaacagggcgagatcaaaattgccgactttggctggtctgtgcacaccttcaacagaagacggactatgtgcggaactctggattacctgccacctgaaatgggtactttgctagccatttacctccagttatgaactagttcaatgggttttgagaattcccacagcagtacctagctgctttccttggctctgaaacctgttgtggtttatccagtggagaaggcagaacatgattaccatgttgatatatggagccttggtgttctgtgctatgagttcctttacggggtcccacctttcgaagctaaggagcactcagaaacctacagaaggtaactccacaactctgggatcttagtatgtcgtccctaacttgccgatatcttgccctagattatttcctgtggcttttgacttttgagctatgctctgataactgtgaggaaacttttgaagttgcatatagtgctagtgtagcaaagagagagcactatattg

SEQ ID NO: 38 - DNA, 730 bp, Zea mays
tgctcgacatgatcccaccagcccatgaggaagttgtccaccaccagcctgaaccaaggggacatcttaacgccatcttccccagcatcagctttcctgagcagctccttcagctgatcgcggttcacgtacttgacgtcggccacctcttcaggattcgggttgagcttcacgtcacgaaccatgaacaggaggtaatccactgaaacaacagaataggaaaggttgtaaagcctgcaactgcaagacagacccttgaaacatgtagagtacagcaaacacaaatagtatgaaaactgggaatccaggatgtgatggcaaaaaggtaatcaagtatgtacactcgtgttcgccccattttccatctgaaggagccatgtaaagcatcctcccaaggaggatgaactggtcaacaggtaattcgtcagcaactattcccagttcatcaaatagtttgcgttgggctgcatttctcacccctgaacagaataaatgattgtggctggtgatgagtagagtgcaagtaacaatatggatggtgcatacaaatctataaagtatggattggtttctcactctccaaggaacatgtatatacctgcacaattttcctcaatcaactctgactcgcggtagagaggatggctacagcaggtgtttgtccagacaagtggaaatgtcacttttgtgcagacctttgctgtaaggatatgaggtaccatatcttctt

SEQ ID NO: 39 - DNA, 1277 bp, Zea mays
  misc_feature (151)..(151): n is a, c, g, or t
cttgcatgcctgcagttatggtgaccttttaggtggtcatcttgttttgttgtggccggatggccatgattattaatttttcttcttctttctttctttctttcttttcttttttgtgtttgtatttggtctatttttagaccctccttcnttcttaattcaatgatacgcagctctcctgcgtgttcgagaaaaaaaattgtagaatgctagataggctgattttgttgtatattttctagagctagagaaacacaaaaagtgctgatcatcttggtcagatagagtcacttcatgtaggatatcccaaagttgaaaaaattgaaaaaggccaaccattgacaaacatttcatgtaggatatcccaaaaaaagggcgtacccaatgccgtaggcttcccgcactgtgcggggtctagggaagggtatctttaagcgccaagccttatccgcataatatgcagaggctgtgcttgaacctgagaccttccggttacagacggtaggctctaccgctgcaccatgcccacccttctcatgttggatatcccaaagttgaaaaaattgaaaaaggccaaccattgacaaattaccctgggtatcagaaaaccatctctagtcccctaaagcatcaaccacaaatatttttctcttgaatgtaatttaaaccgcctcgaacgtagctggagcaacatcagctatgctacgacccatcagctatctgacggaccagaaaagggtcgtcaaatcattaccaaccatagtaacgattgcaatggaaaaaggatgttgctttcttgtgaactagtatctctaagccattccaagttctcggtgccccagttttttctaaccagagccaacggacttgcagagcccaactcatgagcacaaatttagacaccttatcccaaaccacaagacatgaaccaccattaatttgttgtctacctttccataagaaagctcttcttgatttatcgattgctttgatgaaccattttgggaccttgataactagcagcacatgaataggaattgcagtcaagacaaatttgacccaagtagctcttccagccattttcataaggcctactttgcaggaagtttgttatctatcttctcgacccatgaccaaggagcgaattttgttaactttctgttggagatgggtaaccctaaataagtacatgagaactttgagcgcacacaacggatggtttgctcaaccacctccatatggtctgaaccgcgttaaaaaggaattacacaactttt

SEQ ID NO: 40 - DNA, 1211 bp, Zea mays
agtagcgctgaagagcagcctctacggcatccacagcatcatattctgttacctgaagaagatcaggaattgaccaagccgttagacactaataaattatagaagcaatactcctaaatgaaatacataaagagaagggcaatgaggggaagacgctagagttataaactacacacaggcagaaactctgcaatcaatcataaatgcaccctacgagtaaacaaatggtcacataacttctcccaatgacaatcattatagataacataggtaatcgcaattcgtaaggtgaatcactaaggaggcttccaactttgtatatacactgatttggagcagtttgaacatagcctacatattatttgcatgaagaaagtaacaagactacataataatacaagatggaatcatcagtgcagtcttctgagtagaaagtgtataacagtagagatggctgataagaatttttaactcaccgtaattggttcctccatgtccaacatactaagaattgttgaccagcatttctccatattcaccgatgcaccaaacagccaccctaactaaactttcctaaatatatcaacatagaagagatctatgcacattagatacataatccaagagtatacatgacaaagaacatttattatttctccacacctgttcactagatgcttgcaatgctttatataatgacctgactgaatatccttgaagttcagatgcattactcactagaactataagagcatgccatacatcatccttcacatgattaccagcctgtggacataaaaaggtacagtattaattggaatctttaatttacatctgcaacagaaattcatgctcatacatttacagctcaattatttacttagcggaagggaaatcatatagaaacaaaggtgtgtgcaacactaaatgtggtagattatttggcaattggcattttggtttagtaagttggtcttgaatcttttcactggtggagttaccacatctggaaggaaaaggtgtgggtgacaaggattcgataatagacattgctggcactgtgtagatcatagatcagaactcccgaacatagtattccagtgaatgcttaatagtagtccgtaaccctgatcaagtatgctaatctttctctccttaagttaggtaaaaaaaacaagactactctactgaatatacgagcaactagtata

SEQ ID NO: 41 - DNA, 850 bp, Zea mays
agggttgcttgacttgtgtggtcgctctgggatgaagggtaagatgatgtattcccatcgccttttgtttctagctgtcttgctttcttaaatttagagttcagttccgattgctttgcaaattagactttttgcgtagatttgtactaggcttttttgcgtagatttgtacatgtgcagcaagcaactcgttgcagatgatctattgacaattatgatggaccttctaacaatcttctcttttcctttcaggggccttatgacataaatcaaccaaatgcagactgatcttagttgattttgtaagtagtgatgtattttaggttcatattcatgatattcttttattcatcgtctgtattacaaatgaaaaggacggaaaagtaatatatacttttcttacacagtagtgatgtattgtaggttcatattcattatatattgtttcattcaccgtatgtattacaaatgaaaagggcggaaaagtgcaagaacattgaacctctggttcagatctctgatagcgtcaagatgaaagggctgtttcctcagttccgttttgtttcgtttttggatgaattttccatttcttgacactacatgatttctttccagattgtatgggtggagagaaatgaaaccctgtacaaaattaatgatgcgggctcgtaatgtatgctgtccttgctattctgtctcgagaaaaatatgatgttccgtccctctggaataaaaaaacaaaaatgcatttagacatttcgggtacatgaattctgttttgagaaaaactggatgtggagggtttcagtaatcccagatttacatatttcgtccacgaaataatggactt

SEQ ID NO: 42 - DNA, 1278 bp, Zea mays
tcatgatccaattttgtttgttactatctgcaatttagaacaactatcaaatacgatgattttgtggccgaactttttgttctgccatcttgccatccaatggaaatagatgctaacagcactaaatcaaggcaccttagctgtaaagtcaagtactgctgaaacatgtattttagaaggaatgtaaaagatatttagcaaagaaaaacatttgtcatagaactaaaattccagttgctcactacggttgagtaaagaggtcacgagaaaaatacctaagcttatcgactggagtgcagcccagatcaattttacatactggacagtggtccagatcctcatcattgatcttattatagatacaatttctacaaactgcataatacaaagatcacaagaaaaatagaggtgagaacataatataaaaatattaataaggtacagcacaatgcttcatttcaagtagaatagaaatttgctgtctaaacagaagttcttttcagaaggacaggcatggcacagtggtgagaaaccttccaaccgagctaaaaggtcatgggtttgacgcaaactctctgcaaaatgcaggggtaacgcttgcctcagttattcctccccaagaccctgggagctgctagcattgagtctgtcctttaaacaaaagttcttttcaattgaaaacataatagatccatgtcatgacaagtaaaatgatacatgtaaaagaacaagacatgtcgatatttgtactagcgtggaccatacagcatgagattcatatggatcctactatttcaaaagcacacacaacatgaacagttacaccaattcactcacacatgcagagtaaccaagtaaattgcaactatttacagtctatgatggtacattgtggcttcaaaagctgtgtacagttccactgattacaggaaaacattcgtcgaacgcccactgaataccaagagggggtgttaatcctgaactcaaactggatagcaactcaaatcacagcaccggaggcttaataacgttctcctgaacattatctcaacaggaaccaaagcatttcacggattgggggcaaagatgggcaatcaacagcacgggaatcaaagtgcacgtaaaatgcacatgctgaagcccagcattgatgcaacattgcatcacgattcaataaagagaattgcagctcagcctggaaaggcaagaatagaaagcaaggaagctaccgtggtcaactcgaactagatttacgtggagtccagagtggaggtgcga

SEQ ID NO: 43 - DNA, 1223 bp, Zea mays
gtgcctgtggctcactgcactaccagaacacaactcgctagctctgcatcatccgtcgttctggtgagcgagcgagcgagtgagagacctagctagactgaccggcggccgccggcaggccgagaacgaagcgtttgtgcatgtatgaaagtttcgatttttatactgtcgtctacgaattgttccttgatataaatggttgttgttagtgcttcatcgatctgatctcagtgaaggagcaggagccatggcggaccagcagcagccacagcagcagccgcaggagatggacgttgaccgtaccggtggcctcgaactgcctccagggttccgcttccacccgagcgactttgagattgtcagccactacctcaagaataaggtgcacgacagggactacagctgcatcgccatcgcggacgccgacctaaacaagaccgagccatgggacctcccgagtatgtaactaacgagcgacctcgatcgatcgatctatctgtgcatgcagctagcggatgctgctgctagtgctagactaggcatgctagtgatcttgctaggtgtggactgactgatacacggtgcttgtttcgatcgcatgcatgccgcagaagttgcaaagatgggcgagaaggagtggtacttcttctaccagaaggaccgcaagtacccgacggggctgagggcgaaccgggccactgaggcgggttattggaaggcgaccggcaaggacaaggaggtctacgatccccttgcagcggaagggctgctgctggtcggcatgaagaagacgctcgtgttctacaaaggcagggctcccaggggtgacaaaaccaactgggtgatgcacgagtacaggctcgaaggcagcggtaggctccctgctagtcctgcatccgcatccggctcagccaccaacatcgctgcggccatgatgaaagcttcagcttcggcttgcaaggtgcgtggtaccagtaatatatatcaatcaagttcagcaaccatgatgcatgcatccacatactactttctttgtttgcttgcccgcccacggtcacggcttaattacaaatgaaatccgcgcaggatgagtgggtggtctgtcgtgtgttcaacaagaccaccgggatcaagaagacggctgcgccggcataccaggtggccatggccggtgctgagatggatcagaatcagaacaacattccggccatccccatccccat

SEQ ID NO: 44 - DNA, 1070 bp, Zea mays
actgggctgcgagatgcataaacccgccggatgaaggatggagtgctttcacgttattgccgccggcagctgcgagcaagagtttccctgggtcagcgagggtcacggcagaggaagccgaaacggatccaaaggacatggaaggggttgcggacgaacctgacatggcgctctgctggtgcgatgcctgctgctgctgctgctgctgcgtcttgtcgcctggtcgcttctggtagaggcctagggcagcagcacctccggctcccggagccggaggagcgtaggtgttggatatgaagaaatggccttgcgggaatggctgctgtttcatcgatgctggctgcgtatgtgagtgctgcttgctcccaggattggaaccaggcgatgcattaggctgctggccaaggatggatggcatggccatactgaaatgattcgtgggagtagtcctggagccagacgtcgacgcggagttcttggctgactgctgctgtggtgatggcagttggacaggctgctgaacaccctttgcatttcctgtggcgggtgggctgccaccggtacttttggacaccgaattggatggtgaaccagaagcaacaggggcgtttgaagatcgagatagatcccctcctccggtagaaaggtttgttagagaaggtcctacctttgatgaacttaaggaagtctgtgattggtgaccaggagtgtagagagcctgcatagggacttttgcttgttgctggtggagactactgttcttcatcataatcaaattagggggtgtggcggcaggggtagtcgtagcagtagatgaaggtgtccctctccctgaggatgccttcaactggggggattgaactctcccttgggcagcacttgatgggtacatcatattctgaaaattagccatgtttatacggtcttggtacccacctgcactgttctgtgtacttggtgcagcagatctgggccgattcagatggtgatgctgaattagctgctgatgctgctggtgcttttgttgcgcttgcatctgaaggtgctgctgctgctgctgagaaatgctg

SEQ ID NO: 45 - DNA, 1319 bp, Zea mays
catgttcttgggtgttgtatttgcagttgctgagctccgaggtttctctttcaaatccagacatgctcgaatcggtgcagtagcattgacattcgcatctatgcagctagtaaatgcgtatcttcgaccgcataaaacagagaatggagagaccccgcctggaaacagagtagtttgggaatatctccatgttttgaccgggagatctgctgcgcttgctggtaccttggcgctctttactggcttgcagcatcttgggcaccgatatggcagtaagactatcaagggacttacatgcgggctaatcttatgggttataagtgttactttgttaacagcttactttgagtatatggcaattaagcgaaggacagcaggtgttgatggtctttcaggaaattgggtgcttggcaacactgaggaagatgatacagtcgaacttttgcaatctaacagggtagtcagtaaaatggagtctaatttgtcacctgaaccaatggaagtacagctcgagccacttaaaggatgagataaaattctcagcatgcatatggacataaaagtatgttaactaaaattctttatagatagaacgagcggcatatacgtctcaggataaaagaagtttcagtttcgcattttttgttgatataaagggaatattagtgagaatctcatctttgacttgctcgagaggtactatcatgccacatggtatagataggtttttcttttgtcttgtggagcttaggtcctcgtctttaatctcctaacttcttagcaacaatctatgtatacctgtacaattttggtatagttatcataattcataactgaaaagaggatacagtttttttctttctttaaatgtcacatgactcgagcattttcacatatggtactagctgacattatttgtttgtcatatgttgtgtatgtaaattatgtgacttggaactagaaacagccatccaacgaaaccacagtgctcctacattttctaaaatcagttatccacattttatatgtaggctacagttatcctttgtgctaacttttgccttcttaataccaaacctgtggcaatctatgccaacctgatgcattgggccatgtttggtaccaactgaaaggggctcaatgttgtgttgatctgcatcttggtatacctttgtacctgatttcatgatatgtcatgccaaaataccagaaatgcatttacttataaactacatattcatgtctgccttttatctgcaaaagctgctatgacacgcaggagaaagtagttgcccacttgtattccactaacagctcag

SEQ ID NO: 46 - DNA, 701 bp, Zea mays
attcctgcaacaccaatgttgacacccacgacatccttgatggttatgttgcttatggtgggaagcgcgttcctgtcgtagccatcgtcagggtgttcaccatagtttccagtgatcctgatggctatggaaacgtcgtcgaagctgacgtcagctacatacacgttcttcacgtaccctccgcgccccggggctgtcttgatgcggataccgtgcaccgagttgacgatccggaccccctccgctcggacgtccgatatgccgcctgacatctcgcttccaaaggcgagcccggcgctgttccttgtctgtcctgtgatgttgcggatgctgatgttggagctggggtgggcgaaggagatgccgtactcgtcccacccgctcttgatgacgacaatgtcgtcgccgtttctgacgtagcagtcttcgatgcagacgtttgtggatgagtctggatgatggggtttcaagctgcattagtaccacacatgcgacagagaaaacgaaaaaggagatcataaaggaaagcacacagttcaggacttcatgacatacatgaaatgtgtctgacaggaaatactgtgccatggtgccatacatcaagaaataacattttgaagtttttgaactttatgcaataactatggtcattcacttaattaggacatatatatatcagagaaaagaagggcaagcctaga

SEQ ID NO: 47 - DNA, 1287 bp, Zea mays
tccatggactttggctaaaggacaagacaccttcaccccaattagtgcagtagtaagcaatgatttttcttccctgtgcttggagttggttggtggtggataaggacaatatgttttatttatttgtactcacttgttataattacacctcaatgaatcaatgccatattcaggttagtcatgcagaagtgttgttagataaaaacacttgatctttgttgccttccatgctctccgcaggcatctagtgacatgaaatgtgtaatcccatcattattacacaccatgttttttacttaagttaacaataatttctccatcaaccaggttccaaaatcagctgtcactaatcccgatgatctcgagctctggctgaaggtctctcaaatgtgtactgaatttgtttaatgttacctgaattgctagagcatatggtgtacaattgactaccaactgcatccaggtagatgatgaactaaggcagaaaggaccgacaagcgacatgctattcaagattccttttctgataagctatatcagttccatcatgacattaatggagggtgatgtgatactaacaggtagtgacatcttctctacgtgtagcttgtttttgcatctgaagtttctctgtggcttattcatttgttcctcaacaggtactcctgagggtgtgggtcctgtccgagtaggtcagaagattacagctggtataactgacctaattgatgttgagttcgatgttcagaggcgcaatcggtcattttccacatgatgcaataagcaagaaagtaatggtaagcaacataagatagtaaaggtgcatgcttttatttgttgtgtgactgaaaataatatcaggcaattgatttcatataagcaaaacctgtttacccatagcaagaccagtctgatcagagagggcaccatcgtatccatgttcgaggacatccttgaagatgtactacaattggacagccagatggtgtatatgtatagggtatagggccaatatgccagaactgtgttatggggcatcatcataacaaattgtgctaaagctacgttgtcctactccacattctcacatatacatatcaatcaaaacctgaagtacatgaactacttatcagttagaagctgtgctgtatgaactattgttaccgtgatttctttaaaagaatatatgctattgttggattagttataatgatcttaacaatttcaatagtaattattgatgcctatgcgggattcagcgacttaattatttctggctcgtgctgt

SEQ ID NO: 48 - DNA, 1036 bp, Zea mays
cgaagcagctagagaaaaagagctagccatgcacaccgcggccaccaagcctctcctcgtcttctcgtcttcgttttcttcacgtccatggcggtcgtctcccatgcatcgtccctacgcttccaatacatcgaccgtcgtcacaacttcaccgccaagcaggcgagcacctcctcctcgtcgtccccgtcctctgcacacggcagccgcgaccgccgcccttcgttcgcgctagtgcgccgcgacgcagtcaccggctcgacgtacccctcgcgtcgccacgcggtgctcgacctcgtggcccgcgacaatgcgcgcgccgagtacctcgctagtcgcctgtcccccgcggcgtaccagccgacgggcttctccggctcggagtcgaaggtggtgtcgggcctcgacgagggcagcggcgagtacttcgtccgcgtcggcatcggctcgccgcccacggagcagtacctcgtggtggactccggcagcgacgtcatctgggtgcagtgcaagccgtgcctggagtgctacgcgcaggctgacccgctcttcgaccccgccacgtcggcgaccttctccgccgtgccgtgcggctcggccgtctgccggacgctgcgtacctccgggtgcggcgactccggtgggtgcgactacgaggtgtcctacggggacgggtcctacaccaagggcgcgctcgcgctggagacgctcacgctgggcggcacggcggtggagggcgtcgccattggctgcggccaccgcaaccgcggcctcttcgtcggggcggcggggctgctgggcctcggctggggccccatgtcgctggtcgggcagctcggcggcgcggccggcggcgcgttcagctactgcctcgcgagccgcggcgtcgtcggcgacgccgggtcgctcgtgctcggtcggagcgaggcggtgccggagggcgccgtgtgggtgccgctcgtgcggaacccgcaggcgccgagcttctactacgtcggcctgtccgggatcggcgtcggcgacgagaggctgccga

SEQ ID NO: 49 - DNA, 1000 bp, Zea mays
gcagtttccacgagttcctgatcctgaacaacacccaacaccacattcactagcgcaacccctgctccccttctcccaccacccagggacatagcccagtgcgacatcaaactcgaacgttgtcagcactggcttcttgaaaccctccccccagtcgatcgacaagcgtggacaagcaatttgcacccaggcatcaatggaatctccaaatagctccatcctcgccggggaaagctccgacatgagcaccactgtgtgttccaactctttctcctccaaatgctccaccaccctgtcgagaaccttggtgctcccctgcctccccagggtgccaagtacgactccccagctcttggccttcctggccgccagcaccgccgctttcctcgcctgcttcatgccaacatggtcatactcctccagcacgagaaccccgaggaatgggtcgaaacggtaggccttcaccccgggattggcgatcataaacgcctcgaggtggaacctcccgtcggcgacgaacaccacggcgcccacctcctccgacttcttgagcgtcggggcggtgcaacccaggatctcgccggcggacagcggcttcgcctgcggcacgacgatgtcgtggtagccctctaccgtgagcatctcgcgcgcggcgtggaccgcggcgatgaactgcacggtcccggcgatggcgaggcggggcgcggccgctgggtccgggaaggcagctcggacggcggcggcgaggcgggcggcgtccacgcggatctcgacgaagacgtagagcaccgggaggagtgaggccgtgacggggacgaggcaggagtggccgtagtggacgaggaggtcggcggcgagcgccctggcggggcggtcagcgaggcagcaggccccgtaggtggcgtcggcgaggacgaggacgtcgttgtcggcgccgggctcgaggtagggcgcgaggaggtgcgacagtgggagcgcgaagaggagcaggccccgggga

SEQ ID NO: 50 - DNA, 1259 bp, Zea mays
tggagaactgttcaggaatcttcctctattgatactgtaggttcaattgcttcagcagttggcattgttttagacaatttttgtttgattctgcattgacaacaaaggttttcccaaatggtttcccacttaggttgaaaatgatgatttgattgcctacggcctgatcccagaatttattggaaggttgccaataacagttggcctgaccaatcttagtgaagagcaattggttcaagtagtaaatttctttgattttttaatttaaagcaatatttcttaaaattaccatctcaaatatttccaccacctcaaaatattagaaattctctttgcaggtgctcatggagcccaaaaacgcaataggaaagcaatacaagaagctattcaaaatgaatgatgttagtttgtgattcgttttggccaacgaaataattgcaacatttggccgatttttttttactttaaacgataatttataaccaagaaagttatttatgttcatgtttcctccataaggtcaagcttcatttcactgataatgctttgaggatgatagcaaagaacgcactcgcaaaagaaacaggagcccgaggactgcggcctataatggaggacatttgacagaagcaatgtttgaggttgacttgttttttgattttgccatgccagtgggtaatccaatatcagcctggttgatagcactttggtcattccgttgcagattcctgatggtagacacggaaaagagaaggttattgctgttcttgttgacgaagagtctgtaggaccactacactctcgagggtgtcgagcaaaaatttttcgggatgatggagccttggaactgtatgtttaccagaacaatatcaaactgcccgggctgattcagagcaaccccagacgcagacgcattttccggctctgccttctagtcgcattatcggcaacaaagctttggatttaccagacaattccttgtttttcatcgatatatgaatggattgcatggatactatgcaaggtctacaattttacacaataaaatatgatgaggttgattttcgtgttaaactgttcacacagcaaaagaatggctggaccccacgttctgctttcttcggtagcttgcaatgattttgcaacaacaattcgtatcatttacacgctactggtagcaaacagacagttgttttgatactgaacctgaacaaatggaaaatggtttccaatggttacacatcaaaattatgtttgta

SEQ ID NO: 51 - DNA, 1056 bp, Zea mays
ggttgcagctgtgctttagctaaagcgaacgccgtgtatgttttttttttctggtcaactaaacattgttgtgtatacatacataaacagcaatcgaagcagacaataggcaacaaaataacgaattaatgctgttatcaaatgagccagcaacggataaacttgagatgctgccctagtagccgttctcaaactgaagccctcaaggcttcaaacccatcaattgcttgcaactccagccacaatcatactaataattacacttgagcgcagccaaaatagcaataaaaaagttgagcaaagagtgcacctgctttgcttaattgctctgcacgctcacgacgtccaaccgacgctacagcctacagcggcgtgaaaaaagaagagctgttttttaactccacacacggaacaggaattaccaaccgaccgacccagtgtacccgattcggaccagatcttcgtggaattcaccagatctatctagagaagaaacagggaaacaggaaaccagtaccttcccgccggtcgatgagctgatacgtagcgcgctcaggcgactggcccatggggcggctggcctcaggcggggcaagctaaaaagagccctcccgcccgccgcggttcgggctctccttcctgaacaaggtcgagttcggctccggatccggctgggccacggggaagtcggaggcggacgggtgcggacggagacgggggcggagaggtgggggtgagcggacagagcgaagatgggcgtggtcgctgtggatggaggcgaggcgggtgggtgggtggacgggtgaggccgtgagctgaggtgaaggcgaggtgaggtgagggagatggggtggtggagtttgacccgacgcggcggggggtggccgggtggggcccgcgcggccagtgtagggcgcggtggcgtcgaggggaagggtgcggcgcggtgggtggcggccagcctcgggatccgggtccagcacgggcgcacgcgcacctggcgatcggatgggcgtcggccgatacgaatatgcacgcgcacctggcgatccgggt

SEQ ID NO: 52 - DNA, 1109 bp, Zea mays
gctccttgcacggacccgatcagtctacctgcaggttgtactggccagctggtgcaatgtaacttattttccccatagaacccggtggaagagcaacatggtgctgcatcaatgtgttctcaaaaacagtctgcaacacacacccagtccgcaatcattaggatgtaaacacgggttaacagcatgcatttacatatcacagacagctagtcttcagaatgaagccatagatggaagtcaatgtcataagaacttacagcgtatagatctccacctgtgatgacatctccaacacctggaaatatagcacaagaaaacctatttagatagcatcaaagttcaaatacaacttagagataacaaaaacagcatgcaaaaccatttcaacaatggaggtactatgttaagtcactacctagcttcgttggctgaaattcccacaatacatctttgtcaagggcaggaactgaaacaccacgaggaatatacacatctcctgacttaatagcgatggtttttagaggtcgctgcaaacataatagagggcgagtgaggataatagacaaaaaataatgtaaatggccgcaaaagtaagccctgtcgtgttcagcacacctggataccgtcaaaaatgtttccaagaattccaggtcccaattcaactgaaagaggctgcatgggaatagccattacatgttaaatgatagcaaaagaatgatattaaaagatatagtaagatctgaagacaactaaaacaaacctttcttgttctcaatacagggtcattaaccatcagtccagctgtttcctcataaactgcaacacgcaaatgacggcactcgcgaggttagtaccgtgtattcaactggaaaggagcttttcatgcccatgggtgaataatttattatagatgatctgccatgttgcataccttggattgtagctgaatcgccctcaagacggataatttccccaatgaggttatcatgtccgacacgaacaagttcatacatggcagcaccacccattccatcagccacaaccacaggtccagagacctgcaataacccagcatcaaggctaatcaaagtggggcttgttatatacat

SEQ ID NO: 53 - DNA, 1199 bp, Zea mays
ctgctcggtccctgtgagcctctacagtcgacctgcagatccatctcctgggaagaaaattttacgccacatgtcagtactcgagcaagctaagcaattaaacttccagggagataaactagcgtgcagagtattgctgaactacactaacccttctttgcatatattcaacttcagcatacaagagctcattctgcatgcaagaaataaagggtgtattaattgctcatcagcacaaaagtcaaaatcgattacttaaaagcatattggttcctcataggcttggatgtatatatatgcacagctgcacacatttctagtctttgaaacaaattgcaaaaatgcctactttcattaggattttttttaaaatattagtgtcctcatttaaactgacaaaagaaggttacacatatactccgatccatctacaagctattttacatatctgtaccacagacagatatatcacacagttacttaatgcatacctttctagctctaatcttgtttatggccttctccagcttgccctccatctgcttaagctccctgaggcccatggtgtggattgaatctcccactatggtcctactagaccatttaaacaagttagactgcatatactactacaccttttgttgttgcgtaaaagaaaagccgaaacattgtatattagatttgtagaatttggtctaaatttgattgctgatacctgtttgcgttttgcaagctatcgatcgcctggcgcagcttgaaggactcctgctggtagtgctgcaagttaaagtatggatatatatatagtcagtcatcaaataaagcttcttctgcttgttgtgatgaataactgaccttatgctgatttttagagtagtacagaaaattaaaagaacatgacagagaatgtttagacttgtttgagctgaggaactattcatgatatactagctgactagctagatgccaaatcactaattgttgtttgcatcagtgaagcacagataagctccttgcaaaaaagcccttaaacatttctcaattttattttacgtttaaacagttatgtatataaactgaatatctttggacagaatcgttatgcagccatttcctaggatttccccatatgaataccggcgtggtttttaaatcgacaacataatcatgcccataaaaagcaagtataaagagagagc

SEQ ID NO: 54 - DNA, 1155 bp, Zea mays
atcatgaggtttgccgtcgtccatccttaagcaacgggcgcggcatcggcgcatactgtagcgaaacctgcaagaaggtgtgtacctgctgagtgctgcctagtctctccacttcatttggtttcttgtcggccgtatcagatctgttctgtctttttttttcaggtgtctgctcggttatcagacatggtaggcgtaacaaaccacaccgaagatggtttctcatgggctctgctgaagatccagaaagacgaggccgtcagttcacaggacattgctgctgttcttgaatgcaacgtgaagcttgcggtggcgcttggcgtgctgaacgagtgcttcaacccggccaaggatcgccgaactaagatcgatatgctccaccaagctgtctacagcctcgggtaagttcagtcagtcagcactgaaacatctgcgtctcttttcagttcttcgatagcaaaaaaggtttgtgcttcaacagatcagaattcaaacgggtgagctacgaaggattctacaccatggttctggacaaggatggggaaaccattgcagcagccctgctgaggtttggattcaggagtacttgtcagtgttcctggcctagtcgttgttgtatattactgtaagcaaaggtcttcttcttcttcttttttacaggatccatggcacaaaggtcgccgagatgccgttcgctgccacgctgccagcttaccggaaacaagggatgatgcgtcggctggtgaacgctgtcgagcaggtaggaggagcacgacactgtctgcctgcctgcctttctgtatgccactgtcactgttcaccaggtgtgagtgtgaagcaggtgctggcgtcagtgcaagtggacaagctggtgataccggccatagctgctctggtggacacctggacgaggtccttctccttcaggcccctgctggaccccgagtcgagggaggaaatcaggaggcggagtctggtggtcatcgccggcaccaccctgctccacaaacccgtggccgccgcgcggccgccgtcgccacacagacacgctgaagcagcggcgccgaagaatgcagggctgccgtggtggtggaagtacacgcagcaggcgccgccgctcacggacgacgagcgggccttcctggacacggcgcc

SEQ ID NO: 55 - DNA, 1107 bp, Zea mays
tggaaaaaggcatgctttatatttccaaacatgatgtccacacgctcatcagaccttgaagtagaatatctgaaaccattgaaatgagcctcaagatttcctgtgagcttcctcccacgaccaccaaatgcaggtcgtatccacacatcagaaagcctcatcatcttcattctgttgcttccaatctgaagtttctcctgggtaacaagagttgccctttcagctctctctgactcccttgatgccacttgcctcctcaacgttttgatctgctgaacaacttcactgctatgccgtggatcttttgagcggaatgtaatttctttcagatagatagcaccttgagaattaaacttgctatcatttgagaatggcatgccaggcacattgaagaagatacggatagtgcatgtgcggttgtcctggtgactggtcacactcttgacagtagaaacatggaaaggaaccatactaccataaataggtaagaggacagcttcattcttctgatctacttggatcaccaaatctcttacaaatggtacatcattaacattcttatatgcaacaagctcatttgaagccctcgcaggaccacgtccgtcaccagatccagtaccaaccccagcaagccttctagcagtctcttcattcttctggcgagcaagttcagcctggtgctgtctcctgagctcttccttcgacatctcctggttgtctgacctgagagttgccttggttggcataacatctatggtcttcgactttatcttaacctcagcagcaacagcatcatcatcttcgttgaacgaataagcaacatctttgaatgccttggagcagggtgctgttaagacctcatgtcctctttcattgactaaaactgtatcagctaataatagtgaaaactgctttgtcttctcactggttgtttctgcctggatgttatgcaaaccaagggatacattaaaaaccattcccttttttatcctgcgatcattcttggcattcagatttaagccagattctcggaattcaaggcctattccagttccagctgactttgttagattaggaagaagttcaggtgcatccctctcaatcaca

SEQ ID NO: 56 - DNA, 408 bp, Zea mays
tagagttgtgctcctcaacatccatagccccctgtgattcctccactgtgttacatacagttgcagtcaaaatttcagaggattgaactagaaaacgtgcagattagcatcggttgggcagatacgtcaccctttgcttcttgcgcagaaggcagaatcatctcctgctaactttgatcagcgaacaaaacttggttctctccccatttcaaattttaggcatagtttaacagccaatctccaacaataataggctgataactggaataacctaaagtaattttaaattatcgcaacaatggttctgaattataatactagcattttgccctccaaagcgaagagtcagaaccaactccagggaagaaaatacagcagaagtaatgtgtatgaagaattgaagataca

SEQ ID NO: 57 - DNA, 810 bp, Zea mays
tctattccagcctcctcctccgtactgcgcgctaccttttgctcctccgccggcttcggctcgtcttctccgtcctccatattcggcgacgccaccgaggtcgccaacgtgccaccgctcaccacgcccaacctcttcgtcagtggtaacgtctctccgcttcgccccgtcccaccaaactcgtcgcactaatacaaaacaggtgtgtgcgtgaatttaaagctgcgggcacttggataccttaatgctatgtttgtgagcaatccatttggggaactagggataaccactaaccagtaagctttatcgatgaagcacagcatttaaacctgttacagactcctagtttgcatcccatcctgcagtgttgatgtcagaggttggcaatggtgcgaatactcttttttgggtggataaatggattaatgggaaaaaggtagctgatatagcaccaagattgttctgcaccatatcaaaaagaattgccaataaaagaacagtgcaagaggcaatggacaataggagatggattagtgatattaggggcgctctctcagcaggggccttgattgattttttgcatctctgggaagctttaacggatttccaactgcatcctgatattgaagacagacacatttttaccatagcgccagatggtaactactcagcaaaagttgcttatgaagggctcttccagggatcgtgctcctttcttcaccacaaaagaatctggaaatcctggatgccacccaagtgtcatttcttcctgtggctggtggcacatgataaatgctggactgctgatag

SEQ ID NO: 58 - DNA, 445 bp, Zea mays
gttgccgatagaggccgcgatggcgaccatcacggcgccccccatggccgccggaaatctacgcctgcacagacacacaccacgcacgcgacagcagcgtgcgtcgtcagttcatcatacatcaccatatcataccagatcctgcaaacctccagcagaggagacgagacgaagaacagactgcgctcggaaagagccaggctacaaagagcaaatcgggctcgaagagaaccaagcagcctacgaagaacgcaccccaagcaggagggctctcgcttacccccactccggcagcggcggccaaggttcgtgatccccgatcgggcgcggggccttcttaaacagcggcggcgggtggtgaggtggccaaactggagtaagcgctgcggtgaattttagcaacgccgcgcgttggggttggagagcgaggggtgcggagcagggc

SEQ ID NO: 59 - DNA, 379 bp, Zea mays
tacataatcggctgcatgtcgacatgcgacgacccactgaagaacggctcatgctccggcaccgctggctgctgccaggcggagctcccgccgggcgtccagttttaccaaggcttcttcaactcgctgcacaacaccaccaagatatggaagcaaacaccctgcaactacatcaccgtgatggagagcgcggccttcagcttcagctccacctacctcaactcgacggtgttgtacgactccgacgacgggaggacgccggtcgtgatggagtggggaatcacacggcagacgtgcgaagaagccaaagccaacaagactgcgtacgcgtgtgtcagcaaccatagcgactgcgtctacagcgatgccgccggctacc

SEQ ID NO: 60 - DNA, 648 bp, Zea mays
tgacgcaaggttagcttgttctctgaattcgacgaaaatgctactgtggtttgccattggatggcgtttcatgattcgattaattttcggtttcagaattatcagaagcgacctcaaagctgaagaagccgtcacgagtggctcgcgacatgttcccgacgcttcttgcagagatcgagaagatcgtgccagacaagtgcgatctgttgcaggagtcatacagcagattcaaggtaaattggtaacagtaattttcacacgacttgtgaataaagtaacgtaggatacgtgcaagttggaaagacttgcatcatttgtttgacaactttgcctacttcccttacattatatatatttatcggatcaactgatttgtctgctgacaacttccattgcatgcgcaaaatcagctgttctgttactgtataagctgttacattaggaaaatatatacagattttgcgttgctactcgacgagcaattgcaatcaactttacaattctgaaaaaagagcatgagttgattgtttgggcgtggtaaattgatgtttatgtggagggcttgatcataaattcataataatgctctactcgtactggttaacaacacagcagcagcctaaaacttcctttaacacaattttttct

SEQ ID NO: 61 - DNA, 634 bp, Zea mays
tgcagctaaggaacactcacagtaaatccaccctccttatggaaaaaggttgcagaggcacaattcaaccattcagacatgaatgtaaataagaaaacaaattcggaaaaaagtgaaatcttagagcacaggaaggtcatgaaatcatcagttgttgatttgtttcaacatcttgtcatcctcgcatttgcttaaaaatatgctagcctaacctagttcgtatggaactgtttgttcctctgtgttggaattagaaattgacagatacacaccaagttatcatatggatgaaaggaaaaaacatgttcaaaagtcaaaactatgtctaaccttaaccatgttctacccagctcaggctatgaatatgattaaatcaagtctactagaaaataacacacgacacagttatgagaatcgtgaatctagttatcttccgccttattttcttaagaactggaatactgatcatgtccaacttagtcaatgaagtacatatggatcgttgtagttttgcatcgttcaaaccgacaacttattttcagaattacaccagcagactaagagaggcatgtttaccttgccgcttcagaacggagctcgctagaggagcggtgtccttgcttgcactaaggga

SEQ ID NO: 62 - DNA, 662 bp, Zea mays
attatattacctactttaatttcgtgatgatattaacccggattcttttgtttttcagattttcgcactgcacatcaccggaactgtcgatgctgtcctgtcgaaagagcatagacgtgagatatgccgccatatctacaaccatcaggtacctatcacaagcactttttaaatagtattagggctaggacacctacaactcaattaaatctcaattaaatgagaggtatttccaggggtctctagtggacctaagtgaaaaaaaaacaaagaacttgtctatatatacacaacgtactctttatacatattatgttgtgactaaatttatatatatgatctaaactcttagagttgtatcatgcattattttagctatctcttttactttgaaaatccgatctgaaaacttagagttgtacatgctctctctctctacatatatataataaaacgacgctcattgattgattgattgattgattagaacgaggacggcggatggggcttcaatatcatagacgagagcgccatgttttcgacgtgcttaaactacaccagcttgagacttctgggtgaggtgcagcaggaggagaacgatgggctagctaaaggtcgagaatggatcctatcccatggaactgcaactgcagtcacgcaag

SEQ ID NO: 63 - DNA, 697 bp, Zea mays
tcccggtgatccggtagagccaacctgcaggctcgcctccacctccacccgctcgatccctgcatacgcatgcgtgcgtgcgcattgagccatccacgccaggatcaggtgaaaaaaacaacaacaacaccaccgacaacaacaaaggcccagccgcccaggctttgggtaaagaagaaggagctagaattaaaggacgtttagaatccagatccagcagctctctacacagggagggacgatggcagcagcagctgctgctgctgcataccgatcgtactggaagtaatgatcgatctgccggccgggggggccctggcagctggttggccggccggccggaatggacggcggcgggatggggtgggctttgttgaagcctgaaggcgctcatcacggacgtaacgtacgtacctttcactttggacaggcatctgcgtacccgcttctcatgcaacgccaccatctccactttcagctccgtgctctgcgaaacgccaccagcgatcaggaaacgcgcacaggattgggttgttcgttgtcgcaacaatgctgcctttcatgcatctgcatgtgcagtgcagtcccagctagctagtagcttgcgttgcttgcttgctcgcgagagctagttcatcatgcaaagggaaaaggcagcactgcaggtcgactgtagagctcaccagggtaccgagag

SEQ ID NO: 64 - DNA, 1187 bp, Zea mays
tattatggatgggtgagctcatctataatataaacgtgaactacatattcactgcaaatagaataaaagttatagaactcacctatttaaaagtttcctcataatatttatcttttgtgaatgtgaactactgaacttgggaatcaaataaaaaagcaacattcctttatatgtattcctttgaatttctgattgaatgacattcctataatcttttttctacgtttacatattactggcagtcacctctatgagttagaacaacaccttgaccgcttcctgaagtctgcatcgatggccaaaataccattacctttcaatcgctcaacaattagaagcatacttattcagactgtgagtgcatcaaattgcacccaaggatcactcagatactggttgtctgctggacctggagacttccagttatcttcatctggctgtacaaacccagccctctatgctgttgttattgaaagcccatccttacaagtaccgtcctgctgcagaatcgccatatgcccaactagatcagatagtgggtggccatgcggggtatgctgatacaatcctaagctacaacctaactgcaacaaactgcttcagcaatgccaggagtccaggactgaacagcactgaagcagtcaatctggatcgaattgaacaagtgctggacagtcagtttccacatgaatcagcactgaaacatccggatgagcaaaaggagaagaaggcttgtgtggtcgtgcggaggtaaagctttgacctttgtgcggcttcggcctggttctggtagaacttggcgaagcggccgcggttggctggcttgggtttagagggctttttcgggcgcaggccggcgatctcctgcaccagcggcacgtgcaccagcaccgtcctccacgccacgtaccagcctggggcgacgaagcggatcagggaagggaacccacgcaactattcaactgaggagataaggggaggggagtcatactgaggaggatgagggtgaagacgaaggcgatggcaaggacagggcggatgaggaaaacgacggcgacttccgacgcagccgccaggccgccgctcgccatagcgccggcggcagctcagttccggcctcgcaaggaagggatccgctggcgaggttattgagcctatggcatgcgaggcccgcggaagcaagcaaa

SEQ ID NO: 65 - DNA, 624 bp, Zea mays
tccactcaaaatcgccaggttggatttcagtgaccatcatttcttcagtgctcatgtaagtgcagccatctctttttatttttctcaccactgctaaattctgcatgaacaaatcaagacgcctaacaagtcatgaatcagaaaccacaccgatatgcgatacgatacggcgatacgtagtccagcatgtacatgaaacctgtgcactgcctaattctctgcaaaatatatgaaccactactcgcaacaatgcagccagctacttctgttctctgctaaagcaacataatactcgtagtttatgtggttgtgtatttgattaggggtgactattttccattcaccatgtgatggttgccttcctcttattcttgtttacctccaataggacctagagaaaattcaagaaacagcgaggaatctcatggacgagcacagcaaagataccatagtcttagttactgagaaggtagcgccttttgggtccttaatgtctaatcttttgcgtggtcatccattgtaattgtaattccaaactgccctttgtttgggcatgcaggattatgaccgtgatccagaggccctcaagacactggacgcaaacgtttgggtgctgtcttcttc

SEQ ID NO: 66 - DNA, 659 bp, Zea mays
gtgaagagtcatggtcaggccgcgcagcgactgtctctggattggaatccaggtcgcaggaccagacgggacccttgcttgctcgcatcgcatcttgcgtttccggagtcccccgacgacccgacgacccaacgacctctcactttcttctttccttttacgagaagcgaccagcaaggcagcgacctggggttgaccaatagcatgaaggggcgatgggggcggtggcagccttgtcacttggcaggtggcggcagcgacgcggcgtttccttgccggccgcggggctctcgctgcttggatcgctgtgcggtcgtggtggcgcactcggctcggccggctcccccaccccccatgcctgccggccggccggcgagcgacgggtcgtcgcaaagccagcgcgcttttcccacccaaattctcccatccatgcagtacgcgacagagcggctgtgctgagtgctgagtgctgctgcgccgcctctgtttttttccggcagctttgccgtcgaccattccgctttgtgccctcgctctgctgctgcctttcctcagtttctataggaggataccgtaacaagaaaccatacttggcaatatagcttgttttcatctagtggtaaaagtctgaccaattatgcctcgttcgaaaatagcta

SEQ ID NO: 67 - DNA, 630 bp, Zea mays
ttgagatgcttgatgatgaagtctacgttggggcggagaatagctataacctattcacggtgcgcaagaacagcgatgcggcgacagatgacgaaagggccaggcttgaggtggtgggagagtaccaccttggggagtttgtgaacagattccgccacggttcactggtgatgcgccttccagactcggatatagggcagatccctacggtcatctttggcacaataaacggggtgattggcattattgcctccctcccgcacgaccaatacatcttcctggagaagctccagtcgacccttgtgaagtacataaagggcgtcggaaacctgagccacgagcaatggcggtccttccataacgacaagaagacggcggaggctcggaacttccttgacggtgacctgatcgagtctttccttgaccttagccggagcaagatggaggaggtgtccaaggcgatgggcgtccccgtggaggagctgtccaagagggtggaagagctgacgaggcttcactagtgtagatggaacatggaagcgttgcttgtaagcaagtagtaacttgttccctgagctgtagcctccgcggctcgcacgatcaaagtgttcggccgtggctgcaggtcga

SEQ ID NO: 68 - DNA, 715 bp, Zea mays
tcctctatgggcggcttgtctggctccacgttacgagcaggaaaaccggatgagcaaccgacgattagatagcacatccaacacaacacaatcacacaccagacgactccagaccagactgacagtacatacatctgaggtagaggttgaccgcgtggttgaggaagccgctgccccggacgccggtgagcaggctcgttatgggcacgaacgacatggagatgacgtccgggaagccggtgatggtggagagccacttgccgtggccctgcccgctgtcgacgccgcctctcctgacgtgaatgcacaccatgtcctgcgaggatcccaccacgttctaagggcgttcgttattcacattttcttggtgacgagcagtgcagtagaatcgttggggggcaaaaccgcaacagtacgtgcttgcttacatccttgtgagacacgacgggtgatctgaaggactgccaggcggccgatccgggcccaacgtttagcccctgcgacaacctgccgcctcccgcggtggaagaattggaacttgcggtggaatcctccgagaacctgtcgtcggcgagctccttgagccgggcctgcacgtcgctctgcgtgaggctggagcccttgagctgcttcacgcacaccacgtccttgcctcccatcttcaccccgacgatgacgtgagtcccgtacttgtcgatgaacctgcaggcagcag

SEQ ID NO: 69 - DNA, 1038 bp, Zea mays
aacctgagcatcggcaccagcacgccgtccagcgaccggttgaagaaggcctgggacggcgggaacgagtcgaggatgatggacgacgagtgcggcgtcgagaccttgatgtaccggtccagcgccgcggccaccagcgcgttctggaggtagcgcatggcgggcatgagcagcggcgccgcgctcggctgcgccgagagcacctcggaccccacggcgatggccgtgatgttcacggcggggaagtgcgcggccacgttgcgcgccacccagttggccgccgtcgcgttcgagttgccgatggccagcagctgctcgttgggcacggacacgatgacgcggatgccggtgttggacagcgccgccagcatcgccgggtccgcgtcgtagagacgcacgtggcggatgttctgcgaccggagcagcgtggtgatctgcgtcggcgctggcaccgacgacatggccgtgccaatgttcacgccaatgtacgcacctgtacgcgatgacaacaataacaaataaatgcagagaaccaaagtgtaagaaatctttctttcttgatggaagttacgaacgagtgatagaaatctaacgacggtaacaagagcatcacagttttcctggtaaaaaacgccaaaacttaacagtcagatgtttatatgatcttctgattaatgcgagacaggaaattgcgttgtaaggcagcaatcctcaatataaaaacgcattctttcgagcaaagctgtgtggaagaaaaaataaaataaatcgttcgtacagtctagagtaatgtaagaaaggacgaaatgcatgataccaccatgcgttttcgtagcgaaaacaaacaaacaaacaaaagggaaatcgagctagctgtaaaagcacaagacaggccaacttggtacggggaaagacgttggaaacaggagccccctcaccatgctgctgtcccgggcccggccatccacagaaaatcctgggcaatgtgcagtggccagtgaccacgttgattcctgctgctgttgctgcaggcactgc

SEQ ID NO: 70 - DNA, 961 bp, Zea mays
accaacaacttcaacgagagcaacaagctcggggagggcggattcggcaccgtctactggggccgcacctccaagggcgtcgaggtgcatgcatgcactacatatctgttcatggtcttgtcagtttaattacatgtcgtaagctcgtgattaagattcgtgacaaatgtgtgcggtacggtgttcagatcgcggtgaaacgactgaaggcgatgacggccaaggcggagatggagttcgccatcgaggtggagatcctcggccgcgtccggcacaagaaccttctcagcctccgcggcttctacgccggcggcgacgagcgcctcatcgtctatgactacatgcccaaccacagcctgctcacgcatctccacacccagcgcggcgccccctcctcccagcagcatcagcccctcgactgggcacgccgcgttgccatagccatcggtgccgccgagggcctcgcgtgagtcatcatgcatgcgcgcgcacacacaccgacaccgtgcaagtgcaatcaaagactttccttaagaatccgtgtcttcgttcatttcagctacctgcaccacgaggccaacccgcacatcatacaccgggacatcaaggcgagcaacgtgctgctggacgcggagttcgtccccaaggtcgccgacttcgggttcgccaagctcatacccgacggcgtgtcgcacctgacgacgcgggtgaagggcacgctgggctacctggcgccggagtacgccatgtgggggaaggtctccgagagctgcgacgtctacagcttcggcgtgctcctcctggagctcgtcagcgcgcgccgcccgctcgagaagctccccggcggcgtcaagcgcgagatcgtgcagtgggcggcgccgctggtggaccgccgcaagtgggagcgccttgcggacccgcgccttgccggacgcttcgacttgctgcaggcatgcaagat

SEQ ID NO: 71 - DNA, 912 bp, Zea mays
cgaaagccaacaaattatatctggtgtttactgcaaccaagtgacgaatatcattcagtttctcaaaaaggggcgtacccagtgacgtaggcttcccgcactgtgcgggggtctaggaaagggtatctttaagcaccaagccttacccgcataatatgcagaggctagggctcgaacccgggaccttccggttacagacggtaggctctaccgctgcaccaggcccgcccttttgctgataatttatatgtatcgattgccgtctttcttatgcatctatggatctaaccttcaatgtgccttacctttcatgctgccctaatttccatggtttgttcatagaaataagaagcaccaactaacatagttcagtaagttctattaaactagccaatttcccttttagtttataagaccaggagaggtaaatgttgtggaaagaatgacaattatacttaccatctaggatactgtggtagcgaagaaggttcgtgataatggaaccaggatgaagagaatttgcagttatgttgacattatcttcctgttagacaaaatattgtatcatagatagagagaaatagttatagaacaccttaaaaaactggaaactgaatggtaactgtaaagagaacatataatcagcaaaatctgaaacattataatttttgtgattggatgatgagtgttccttgaatttgttacaccaagattagcaataaatgcactcaaacttccatgtccaagttggaacaactcactgtcactgcccaatgatctttatttaccaaaagctacaatttttaaaattcagatgcaaacatctttaaaaaataatgcaagtgatgttggtcacaaacagttgcaatgcataccaaggaccctgacatgcttgccgaacaatccagagct

SEQ ID NO: 72 - DNA, 999 bp, Zea mays
tgcatgcctgcagacggggccctgctgccactgtgatctcgtgagctaacctgtgtgactgtgcgtttcttccttcctcctaccctcccctcccgtcctcacctcagactagctcggaatcctccgtcgccgagcaaaggttccaccaaaagaccaaaccccaagtcctcgcaggatttgattctctgaccgattcagggacaccttcctcagagcaatacttaccagcgtgggcgtggctaccaaccgcatagtttccatgagcagatgcaaaccagtcggcggcgagagcccagcagcagacggacctgacccgcggcggccgatgtcggagacgccgtgttccgtgcagcccggggtcctccctctcctcgggaagccatacttcacatgcattctctgcaagtctcatgtcaaccagccgttccaagtggtactgctgctactcatgctctctgcttgcatctgctgaaacacttgtctcctgctcccgctcgctgctggggggcgcaggctaaagccgtgcatttcgtagtgtaatgatcgaagtcctttggtgcctggctctggctggctgcatctgcatgcaggtggtccccaagtcgctggcgccgttcctcccggggacgacggtgccggcgacggtgacgtggcacgggcggtcctgggagatgcggttcacgggggggcggcagatccagcgcctggaggccgggtggcggggcttcgcgctggacaacggactgaagctcggcgacgggtgcgtcttcgaggtggtggacggcagggcggagcgcgtggtgttcagggtgcaggtgctccgcgccgacatccccgcggagatccgggagcgggccggcgggtacactccgtccagccccatcctcatcgactagctagctcattgctcacctcatctcatcagctgctggtctgtatccccccgtgcggccgtctgccactgtcactgcgccggcctgaaactgaactgattcagct

SEQ ID NO: 73 - DNA, 912 bp, Zea mays
agaagtgcagaactccagcaccaacggctgctcacctgcaccccctgctgtcctgctccattcaacggcgcctgcgcccctctgcctgcttggctgctcgcctgctccagtccagatatcagcggctactccagcaccattgacttgatgagctcgtcatctcaaggttcctcctgctccccccccccccctctcccggatggttgctgtcgtaatcctaagccagtgatgactgatgagtagtgacttgtacttatgtctctgtttgcaaactgctattttgtttatgtagctgtttgttctaatttatataatgtatataggtatatttatatatgtatatacctatataagtgtaactacaagtctaaaaggtctaggacgactaggggtcaactagtcgccttggtcgtcgcctaatcgcaattagtcacctagtcaatcctggggagcaaccaggcgacttgcaatcattggattggatgccactgtagagcatctgatttgatcctactattggtgactggattttaaaagatggaaattgagggtccatggatctacaaaacacaaatcttgcagtaccaaagtaataatgcagataacacacaacattcaaatagcagcaaatgcaaatttacatgtttactgtcagaaatatatgaggtttcctatcagcaaagatcaagtaacacacaaacatcatcaagtcaatagcaatgaacagaagacgttaaataaagcggtaagaagataaactaagattagctaactggaaccagcaagattttgaaatatgagacttacagacagcaatgcaccagcctgttcaacaataatttgcctagtagagtgcatattttcagctagcaatgatgcattatgaagcccaagcacagaagctgattcagg

SEQ ID NO: 74 - DNA, 932 bp, Zea mays
gcatgcctgcagctgagacaatggtctggaccgttgcataaagataatctacgcctagcgcacaattaactgctccggctgatcaaaacctgtacatatgcaatccaataggagtaataaacctaccgatcaccagaccgtcattctgccatcagttgcttactgatcgtgtactatgccagatcagctgctttgttttggtctcctgccatcctcgtgcgtcgcgcgcgcggccttcctctacctttttttttcttcttttttttttcttttccttggaaatgtgaaacccggccggccttcgcagccccttcgtttccacaccactttactccttaaccctaggtcgcgccagccatggcaatcagctaactagagtgtccattcaaagcaaaaccacacggtactaatagtaatcaaccgcacgccccctcgcgcgcgcccacacagtccacgtacgtgatatacacagcagcagcagcagcagcagctagacggccatctgatcaaccttctcgagctcttctcacatctcccgctcatttttaccacaagctagccaagagggctcgctcgctagcttagctatatccggccgccgacattatactgacgatggcccacgccgccgcggcagcgctcgcccttctcgtcttcttctgcgcgcaagcgcgggacgcggccgtccatgtcgtcgacgcggcggcgacgctgtcgcaggggcagtcgctgggcgccaccgacaagctggtgtcggccggaggcaccttcgagctggccttcttcacgccgacggggggcgacccgtcgcggcggtacctgggcgtcatgtacgcgcagtccaccgagcagaccgtgccgtgggtggccaaccgcgacgcgcccgtcagcgcggcctccgcgtactcggcgaccgtcacggccgccgggga

SEQ ID NO: 75 - DNA, 539 bp, Zea mays
aactcaggatgttccaaggtctgtgatttgtaatgttcatggagttaaccccaaatttattgagattggcaaattgaaacatcagcagctatgccaaagagagcaagcattcttcaagggtgcatattatatcggaaagatggtatggagtaaaggttacacagagcttcttcagcttcttcataagcaccaaatggaattgtctggccttaaaatggagttgtatggcagtggggaagatgctgatgaagtaaaggcatcagctgagcgactgagcttagatattagagtctatccaggccgtgatcatggagattcaatatttcacgagtgagtatttaatagatgaacaataactttttatacattcttactagctgctagattgttttatgttcaggtataatttatgataagttctttgtaccatcactttataatctttgagtctcgactgaactgtgttattgattccattgtctgtcccagctacaaggtcttcataaacccaagtacaactgatgtggtatgcacaacaa

SEQ ID NO: 76 - DNA, 526 bp, Zea mays
tactcacaccattatgtccagtggtgtcttcattcagctttgctgttttagtactgtgatcgccatggaacaggccaccttttctcaaccttttcaaagcaggagagccaaaaaaatcatcctcaactgtgttaccatcttcagcatcataattatcatcatcactatcctcattatacttaacttcttgcttctgcctgctagatctgcgagtttgttgacctggccctgccctattttcagaaggaccatgttttagaatctcttcctcactgtcgctactggtttctgatatgctagattcactggattcaaatgctgccctcctgccccttttcaatccagcacttgatgaagcttttgaaggtttcctggtggactgtgcagatttcattttgtttttcagtccacctgcgttaccatcagctttccgctttgtattcacattagcatgatgagaactggtattaacatgaactcctgaagtggcagaccagcctttctgaccagtgacatttgattgatg

SEQ ID NO: 77 - DNA, 478 bp, Zea mays
tcaaggcattttaataagtgcatgatcaatcataaactcaccaacttccaaggtttccacatcaaacacctctgaatccacgcttccctgcacgtcttctggaaataattgacgagcaatcactctctttcgagatccggcccatccgggactctcacttgtttgtggtaatgcagcacttttggttggatgcccctttgatgggaaacccaataacaggtcctcgaaaggatagcgaacagcagcagacgaatgaccacattttttgcaggacagtgtccgagccatctcaaacctaaaaatcgaatccatcattgtaggtgcatcactttgcttgttattattcttgtcgctttcattccaaatagcgcgcaaggccgtaagcaagtcgtggctgtcttccatagttccaatttgaaatcccgaaggatcacgcagatttaaacaattcaaaagtttaatcggattaaggacgcct

SEQ ID NO: 78 - DNA, 507 bp, Zea mays
cgctgaaccttagctccaaccacttcaccgggccgctgccccgcgagctcgggcggctcgataagctcgtcgtgttggacttgtcgcgcaacgagatatccggccagatcccaggcgacatgagagggatgctgagcttgatcgaggtcaatctgtcgaacaaccggctcgcgggcgccataccggtgttcgggccgttccagaagagcgcggcctccagcttctccggcaatgccgagctgtgcggcgacccgctgaccgtagactgtggatcatcaatctatggctccagctatggaacggagacggaccacaggggaatatcttacagggtggccttggcagtcgttggttcctgcgtgctcatcttctcgctggtgtcgttgctggtggcgttgttcatgtggcgcgagaggcaggagaaggaggaggaggaggcgaagaagaaggcggcggaggtggcggtggcggcagcagccccacaggtggtggcctcggccgtgttcg

SEQ ID NO: 79 - DNA, 616 bp, Zea mays
tgcctgcagatatagcatctttgttctggttctagggttctttcggtttgtctccacgctttgcgccaacctttctcttctttcttgctatagtacgtagtagtacacaccgcaccacgaaagaaaaaaagacagtttggcactgccgctgtgttttgtcttatatgattcagactttcagcgatcagtacgaacagccttttcagggacagcgtttaggtccctaataatttcagcgctctaataatcatggctgctagcgacattttgccttgttggccttgttgaatgatttaggctgctgtgcacagtggcatctacgactacgacctagctagctaggtactagctttcatcgataaagtaaaaaagaaaagcattggttaataaaacgtattaaaaaaaagtagtgcaatatgcatgggagtaataatatatactactgtacctcacgggctgttgcggaccggaacgtgatcatgtgcgccagcgccgggatgatgtagacggtgaagctgacgaggagggagccgacggcggagttgatgggcccgaagaaggggaagatgatggcgaggaaccagatggggacgacgacggggaggcgcgcggcggc

SEQ ID NO: 80 - DNA, 726 bp, Zea mays
tgcatgcctgcagggcgcctgtttgtccccggatcctgtttcgctactgcgtgatacgatctattcgccctagctagagggctgacctctgaacaatctggcgagccactgagcttgccctgtaggagaaggaagaacgtcgtctgctgcgctgagagccacgttcagttcagtggcgtggcccgcagaaaactgcaataatacaagcccaaaagagagaaataatattcctcaagccgatccgattatctcaacacacactagctgctgtttcgctgatgatatgctgctcggcgtatctgaagacccaaaaaccctacactttatacacgtacattttagctgaaattaaacccctatatatcgcacatctctgtctttgctcaaagaatgtttctttggttcctttgttcttgacctgacgttgcatactctcagtctcaagttactacataccgcaacactttgctcattcatccgcatccggggaaggggctatactgtgtcgttttccgagtccaacactttctttgcccgtcttttacccgtctccactatggaaggctcgagtaaagctgatggtttcgctccaaatctgcaaccgcctcaaataaactttgtctcttcagggtcatgcatgcatcgccaaccaacgtagaatctgagcatgtttggtgggtgaagaaggaatgctccatttagctaatcacggctggagcttttcgt

SEQ ID NO: 81 - DNA, 723 bp, Zea mays
aagtttcacattattaagtctgattttcatatctcctgaccacaaaatttttcaaccgcattaccctttacattttattgcctttcagcaagaaagttaatattaaccttcaggacacaatgctaatactgaaccaatatttcatacaggattttgctgataaaatggcagtgacaacaattatagttcctaatgcactgaataatatgacagctacctatagactaaatgtgaaacataacactaaagctgagtagcaaattacctggaccagcagcacgttttttagatggtgtagcaggcaagccctcgatacgaacattctgccttgacactaagtcatcaagagatggcattggttcagccaaaagaccaaggcggtttatttctgaagcaacagatggcctggcaacaatcagtgagttatacaatgatgaacctttctcccatgccatgctttccaaaagctgttcttctaaggaatttaggtgccttttcaattctcttgggagggtctcttcatgtctcacaaagttctcaattattttgctcaaatcaaatgcagttagaccggtactctcaagaacagcaggaaacatcatgatgactgtcttatgtgtcgccaatactaagtccgctgaacatgcaatcaaacatcggtggaaacgctcatttgacagcaatggagttagattatttacattgctgttttgtaactccgct

SEQ ID NO: 82 - DNA, 812 bp, Zea mays
cttgcatgcctgcaggggccagctgcggtgcgtgcgcaccagaaaacgcatggcccgccgcccgccggggccgctccgtggctccacagggtggagactggagaatcgagatcgagcagtggagcttatgtgtatgaatgttgagttgatctataagggcatgtataatctagagtttatgaaaaataaaaatcattcgaatctgaattcgaatcagtatccatatccaacttttatatttatcttttgaagaggaataggaccaatttgaagtcaatttttatgaatctaaaaataagaatatagatttgcatagcaggctttatatcttatttattcacaatcaagaaacgaagacaaaattttcatatctgaataaattattggatctataacttttttttgttttgttgaagacctagattctataagtctaatgctgacagaagagcagcagctggatagctagttggatagaactgcttttttctctctggggcgtctctatcggcgaaacgatcctcagctcagctgggaggatgagaaccaagaacggcatatcctgcgagatattatctcgattggtagcactaatgcactatgggacacatcgccaacttgtgcagatgagggaaaagcttttgccacactggatagcagatagctattctcgatatctggattcacgatctgaaccaggctcacggcgacaggtactcctgcctttttttttggcacacaggacgctcgatatgtacatgctgtttttagacaaaagtgttactaggatacagtgatcaggctgagagaag

SEQ ID NO: 83 - DNA, 779 bp, Zea mays
tacctagtattccagaggtgatttctcttcattgacagagagcaaatctggttcgtgatccctagtaccagagagggacacggttttcctatcgatgtgttagagtcaagtactcaagcttttgtggttccaatggagtctaagcgtgtgagtgatcaggatgctttgatcgacctggagagtggcaatggcactacagtaagcaactacaccaatggtggggatgctagtttcacagtggggcaagcaagaacagcgcctaatggtgcgtggaatggttgtgtgtgtgccaacgggtgtccgagggacgacaggaatcagcacatggattgctcccctcctgcttcggatgctgttgctagaagtggagatgacaggaagtctgagggggaggagaagcttatggacagctcaggaggggagaagacgaagaagaagcggtccaagaagccaccgcggccgccaaggccgctgacacctacgccgttggatgtttctgaccagaagctcctcaacgaactgagtgagcttgcggtgttgaaacgggcaaggattgagcggatgaaggctttgaagaagatgaagaatgccaagcaagggtcctcgggtggcaatttgtgccccctgatcattaccattatcttctgcatcgtcatactgtggcaaggtatatagatctgttcactactattgatagtggtgccgtgtttgtatgcaacaatataagtttgcgccccatgaatagaacattgactcaaacgtcgaattgaaccttttct

SEQ ID NO: 84 - DNA, 822 bp, Zea mays
actatcagcaccaacatcggtcttactgggtggctgccagcctcaatagtgaatctctcgacgaccatgcaaggcctcatgttggctgacacagggatcgtaggaagcatccccttagaaattggcaatcttttcaacctccagttcttcagcgtgtcaaatacttccgtgtctggtgcggtcccagatagcattggcaagctggtaaacttggttgaattaaacctgtacaataccaatctttcagggcttataccttcatctattggaaatctttcagagttagctgcgcttgctgcattcaatagcaatctggagggaccaattcccaaaagcatagggaggctgaagaacctctatgcccttgatatgtcaagtaaccgcctaaacggttcaattcccatcgagattttccagctaccactcctttctagatacttaggcttatcacataattcattatcaggtaccctacccgctgaggttggtagcttgacaaaccttaacatcctggcgctatctggaaaccaactgtctggtgagatacctggtagcattggggactgcaccgtgttgcaggaacttgggctggatgacaacttatttgaaggagccatacctcaatctctgagcaatataaagggcctaactggactcaacttgtccatgaataagttgtctggcgtcattcctgaagccattggtagcatgcgcaaccttcaacagttgtatctggcacacaacaatatgtcatggacaatcccaattatattgcataacttgacattggcagaataagatctatacttgaacaaactgcaa

SEQ ID NO: 85 - DNA, 762 bp, Zea mays
cccctcttgcgtgcctgcagtgtgtcaccccttgcttggttcatgtcaaatcaggaaactagttttgtgacaattggacaacgagtgcttgccaatccactgaggtaaccatcttggttcatatttcattttacattcatgttgtggttatgcattatctattggttctagtatttcaatctttaggttgtgtgaatcgtcctcttatttgttttgttcttcggggtgttactatcctaagatgtttgctttgtaatttttttcctgaaccttctttattcagggttcggtttcattatggccatcctgatgtcttcgatcgtcttttccacgttacgaggggcggtgtcagtaaagcatccaaaattatcaatcttagtgaggacatctttgcaggtacttttcttttgctgttactgctcaacatttgtaaatgtggaaccactaagataatattttggcttcttatggttcaggattcaattccacattgcgcgaaggcaatgttactcaccatgaatacatgcaagttggcaaaggaagggatgtaggtctcaatcaaatatctctgtttgaggcaaagatagcaaatggcaatggcgaacaaacgctgagccgtgacatctaccggctaggtcatcgctttgatttcttcaggatgctgtcttgttactacacaacaattggtttctacttcagtacaatggtatttttctgacctgaattgtaaaccgctcttgtttattcattggttaacactta

SEQ ID NO: 86 - DNA, 789 bp, Zea mays
atatattatatctgtagctgagctaatgttttagccgctcgcctgttcctgctaaattggcattttgaaatctgttcttgtttcaggactcctatgtggttcaaaaggatgctatcaccgtcgaagaagactgaaaatagtccagtatttaggttttttatggatctgaatgatgcaggtaatgctgtctctatacctttcgttgttcttctctgtttgatgcttgtgaccttagctgttatttaaagtctgttcaaaccattcagtcagggacaataaaaatttcctgaatccagttctcgtctttggatttctaggtcaataaatgtcctgaacccaaacctgagtgcaaagcatccctatcttttggaaccgctaaacatgtatagttaattctgaaatggactgtgaccagctctggcaagacaaaaaggtccacagttgcttattgacctattgggcaggttaaaaaacacccactttggttcctagttctctggatgtagtttacactttcttttgatggtggtaggttgcaatatcttgtaccaagaaaagatgatttatttctaagcaggatttactcgtaatattgtctaaagacacttgatttctcggcagtaccttttctataacaatgttctgcaaatttagtcatctccagcttatttagtgagtctgaaaggatgttcagcacttcagctaatgtggtctatcatttccagtatcctatgtaaagcgactaaatgtgccaagcggcatggtgggggccttgtcgccttgatgtaa

SEQ ID NO: 87 - DNA, 734 bp, Zea mays
tcatcgccaagtacaggcccaccatgcctgttctttctgttgtcattcctcgtctgaagacaaaccaactgagatggagtttcactggtgcttttgaggtacgtgaaccccaatattctttgtgatctttcctgttagatgttttctttttatgcaacactgacattatctattattagcatgttgatcatttcttttgtgaatggtaacattggtctttgaagtttctcttgtagatattgaacatgtgtcatgcaatgcttaagagagattactttatttgagaagaattaagaaccttgattgccttctcttgtactgatacttggcaccatgcaactcatttgttgtttctttttcttgcaggcaagacagtcgctgatagttagaggcctctttccgatgcttgctgatcctcggcatccagtaagttaactgaagtctttcagttcactactttgtataagcaacacatactggctgcactgctcacttgtacacatgagcaactcatttctagcatcgttggggatggaaagattttgcaaacacatccccattgcctttgtattcttggacaagcattttttttattcatctattttggtaagatatccgatgaaaacttgatggcttttggtaagcagtatgatactgctaggagcctaggacccagatatctttctttattaacataacaatattatcatattatagatttatagtgtacttgc

SEQ ID NO: 88 - DNA, 859 bp, Zea mays
atagaaacagtagttcgaggtagcacaggcagttgagatggagtagtttggacccatgaaaccaatgtccattccaagcagggcagaacccatgtttgtgatagcatatgggatgaagaaaggagttatctttctgtatcccttctcaatgagattctggacaccatccgaaaacaccgtgaggccacccataccagtgcccacaagcacaccggcccgggtcttgtcaatctgccagagagaatattttaccaattagcatcaaatgtagcattaacagtgaaaaaatcttatagtactagtaaaaatatcaaactaccagatgaaactactatcaatacagtacaaaccatagtttgatgtgctagaagacaatttgatttaatccaaaaatgctactccctctgacctgtagggcgtgtttattttgaagaaaccaaactcgtaaacccaaccaacaattagtcaaattatgtgtgtttggagtacaaaagctatatcaacagatttatactcaaacaacttttaatgcgacattgattttgcagagactagcaatattataaaacaataatggttaaaatatgcttctaatgacactatccgtccacaatatgcctggaaaaaggtagtactttgctagaaaaatcaccataatgcaagtgaatcatcaaacgaaacaacagattttcgcagagctatgttaatacgaattaaacctgttgtgcctatgttaatactgttctaattgtaagacacttgtcgttttgccctacaccacggtttgcaatggaaatcgatgcgctaattagccaatagccactgtagcattggctactactcaaaatgagctgtctat

SEQ ID NO: 89 - DNA, 743 bp, Zea mays
aaagttcaatcaacggttaaaaaaagtgatctgaatccggtatggaatgaagtgcttaagatatctgttcctcgaaattatggacctctaaaacttgtaagttttatcattagaaccttttaattattttccttatatccaaaggattctagttcaaataagagtacaatatggtaagtgtcatgaattatggcaaagtccttagggtgtttccttgaatcagtcacattatacttccctatgtcccaaaataactgcacacctcatttttctggaagtcaaactttttaaagcttgactaaaattatagaaatattatcaacatttgtatatcctaatgtatattatgaaattaatctaatcatacttattgtgcatcataaatattagtatatttttgtatatgtttagtcaaattttcaaaaagtttgtcgaagaaataaaacacttcacattatgcttcaagaaaagagcagagtgttgagaaagtagccaagaaaaaagctgctggctattagcgacatgaaagtaatacacataatatctatgtccaggaagtgtatgaccatgatatgttctcagctgatgatatcatgggtgaagcagagatagatctccagccaatgatcacagccgccatggcctttggagatacttcacgtcttggtgacatgcaaattgggaggtggttcatgaccaaagacaacgccctgatgaaagatagcacggtgaatgttgtggca

SEQ ID NO: 90 - DNA, 825 bp, Zea mays
tgaatcccacccatcttagcttccattactaatctcgttatccacaatttctccctcttttgtcaatcgtgtttggtctgattaggagagggcgctaaggaagatgtccggatcaccggtgttactgtcaatggaggactcctctactgccaacgttagttttcttcaactggatttgcttgaaattggtcttgttacaaaatacctgctgttggtgtatcaatttctttggggtttgtgattgcaaagttatcagatgatgaggatgatgaaaaattgggcgatgctgatgaagatgctgagagcgagaagctcagccaacctgttgacaatacgtctgataagcctgacgcacccagctgccgccttagatctggtatagaggtttagttcttttcttgttttacatagagccttctatcttttatgttgtgtgctcacttagagttttggtgttgtatacatagatcatcggaaggagaagtcccttgggctcctcactcagaattttgtcaagctcttcctcaacatggaggtgagaggactgaattcaccctgtatggtttgggttatttccctttcgcacttaactgtaatgaggcttgtatttcgtacaggttgggacaatctcacttgacgaagctgcaaggctttttcttggagagggacatgcagacagcaacatgagaagttagtacatgcattccttttgtttaattccatgcttatgcccaaatatttttcatatccaaatagaatttgcactgattctaatatgcaaaagcacccaaagtcgtcgattgtatgacattgccaagggcttgc

SEQ ID NO: 91 - DNA, 779 bp, Zea mays
cttgcatgcctgcagccaagtagctcaagtacatcaaattcaatctaaaaggaagtgcagcaaatggcataagagcatgtgtgactgagtgcaaaagcgggaagagaagcttcgacggcagcaaatggcatacgagcatgtttgagacatgttttatcatcaaaagcggcaagagaagcagtgcctcacacctcttgtccgggcgaagggctccccaatgcaaaatcagggaaccgcttgtgttggtcacctccaggctaatctctgacaccaaaccctgcggcgctgggttcactgcgacctgttcccacacaatgcaccaatagtgttatagagataaaaatcgtagcagatgggtgaatgaacctggtatccagcggtcgcacctggagctcggagttggaatccagcgtgaactttccgataagctgcgacaagagcaacggaaagacatgaaaatgaagcaggcaaattgccaaacagtgggagaacatcagctgatgatggcccagcggcgaaagatagagcaggcatgaggtgcttacgtcgggggacgcgcggtccgcggacgtggcgacggcgcgcggcacgacggggccgcggctagaggcggagagcgtcgtggggcggcgctggcccccgctgcgtcggagggacgctggctgcggctgctgctgccgcttccctggcgaggaggccgcgggccgtgccgcggaacgcgagcgcgcaccgttcaacccgccgttggcgttggccgcggcacctggaatcccggacat

SEQ ID NO: 92 - DNA, 829 bp, Zea mays
gagggacgggatgaacctgatcccatacgagtacgtaattgctcgacaagggaatgagaggatagatagtattctaggccttggtccggcttcaaggaagaagagcatgcttgtcgtgtcagagttcatcggctgctcgccctccctgagcggtgctatccgtgtgaacccttggaacatcgattcagtagccgacgcaatggactacgcgctggagatgccggaaggggagaaggtgttgagacatgagaaacaccacagatacgtgagcacgcacgacgtcgggtactgggcgaacagcttcctgcaagatcttgagcggatttgcctcgaccataacaggaggcgttgctggggcatagggtttgggctgaagttcagggttgtggccctcgacccaaacttcaagaagcttgcggtggagcacttggtctcggcctaccggaggacgaagaagcgcgtcattctcttagactacgatgggacgctgatgccgcagacttcgctcggtaagagtcctacctcaaggacgatagacatgttgaacagcctttgccgcgacaggaacaacatggtcttccttgtgagcgcaaagagccggatgactctgaacgaatggttcttaccatgtgagagccttggactagcagctgaacacggctgcttcctcaggtaaaataataacttcctgctgtctcccaagcagttcgtgatctgctactgctggagagcacacacactaatcgctgatgctgtcgacggttgtgtaggctgagaagagacgcagaatgggagacatgcgttccggtgatagactgcaggcatgcaa

SEQ ID NO: 93 - DNA, 846 bp, Zea mays
accgcggtaaacccatgttatgtatctcattgatgaacatgactcaaaacaaacactactcaaaacttcatttaattagagacaatttggcatgtgtttaaaaaaaaggtaaaagtagactgctctatacagatttaggaataacatacgataagccgcactagaacatctgattcctatgtttctcatggaatatatataatagaagcaacaaaaaaagaaaagataagaaatgcactgttaagttataaatgagataagaaatgcactgccaagttaataacgagataagagatgcactgctaaggtaatgtgaaaagctgcaccactgaaaaaaaaaatctgaaacttctgctcaacaatgtgtgagacagggcatacccatatccttcttctgaccatcccgcagtaaaaattccttctgcggtcgtaaagccttgatgctccattccatggagcagcatatttgcagcaacagcgtatgtaacaccagtccagatttcacgtgattgcatgcatgtctcgtccacctttccctttggagtcataccatttacagctcccatccgtcctcctttaaccttcatcacattgaattcaaatattttttgcagagcagttcttatcttgtgctcatcgaaaagcgggggcaagcccgacgaggcagcataccactgtcctgccagctgatcagcctgaatggatctactattgctacttgtgccgctgtcgtaattgaaatatgacccattccataacttcgcctcatatactgctttggcttttataaactttagcttgtacttctcagcaaagtgccgatccccaaggcgatgagccattgta

SEQ ID NO: 94 - DNA, 897 bp, Zea mays
tgcatgcctgcagctaccacattaatttcaggtacagcagcagctggttctgctataatagctgcatctgtggtgctgctctctggcttttttttgtttttcttcttggatccaccaatgttctcaacaagctttgagccagatgacaaatgctcaccatgctcatccaggctaggaacttcgactcttccttttgcttttttggagctagagctgactctttcagtaccaacataatcaccattagaatcttggcctgcatggcctgatctactagcaaacctttcattctccgccaacctggatgagtcatttgcatcttcattaatttcatgcagatcagagttatgataaacatgcatgtccagatttcccgcccctttccgcttcctttcaccacttgctgctggaggtttcatgacatcactaatctgttctgtcaccatcacatccacatcacgtaaatagccagtctctgaacccttcccttcgaatcctttgctctgggagggttctaaatctgcatcagtagtaggatagttcattttggccactttagcaagcttgtttggctttttggcaccatgtgctggtctatgatacccagaatggtgacgctctggcttccgttcaagataatgcacttccccgccatcttcaaacttttccgaggaatcagattctgtctcatcactttgagcatagacagcattgctcctggagtgcttctggccagtcctatctagttgtgtactggatttacctgccatcttcgcttgtgatatcttgcttctagggtcagaaccaacatgggcatcattaacctgctggtcaatacttttataggacttaaccttcaggccataaccagcttgatctttcctgctcctgtaatca

SEQ ID NO: 95 - DNA, 434 bp, Zea mays
tgttccttgtgactgacatcttttcttcacacgatctcactgcacaaagatacaatgtatgtactaattatgcttgaaagaatttctggtactcaaatctcgatgacagaaacaaacgcaatgtattaaaatctctgaaggcatactttctaaccaaagggaaaaacaattacctgcactgtgggcagcttgctgtcggtaattaatatccatatcccggttggcatgtctgagcgtaagcgtagggatactgaggagaccaaacgaagcagtcgcgtccgaacccgccgctgctgttcctttgagcctgccaatatttatgcatgtaaacaacacacagcttggatggaaagtagcaaataaacaagcgacgggaattacctgcttgtcagcagaagggtaaccccacgaaagttttatggctttacctccca

SEQ ID NO: 96 - DNA, 510 bp, Zea mays
tgcccagctcgtcgatcgcagccagcaacagcaacagccagcaagctaagattcatcatggcttacgaaatctctcggcctccataaatcacccatcgcaagcatgctctagcattagcattaccttgcccccgaaacgccagggcggccatcgaaacgcgagagccattcgaggataggtggaggcagcagtggcaaggaacgcgagggcaacaagaaactgcggctagcgatggcggacacgccgtcgccgtcgccgacggcggccgccggggcggagccggggtccgcgtcgacgccgctgctgcggcggaggggctcgtacacgcggaccgtgtcgcacgcgcgcgacgagctcagcagtttccgctccggcctgcggtggatgtgcgtcgaccactcggacgcctccagccccgccgtgtcctggctcgtcttcgccgcgctcggcgtggccgtccccgccgccgcgcacgcggcggcggcgccgcggcgcgcctacgacacgca

SEQ ID NO: 97 - DNA, 516 bp, Zea mays
tgcctttctaatgtcaaagttctgctccttgcgctctccctaaacaagcacgaagtatcaagcacaaaagtctatatctagaacaaagcatatgatttaaaaccatcagatgccagccagatataagttacctggacatagatatcgaaaaccctcctccctcagcttctccaagactgcatgtctggaaagtcaacctctgcaaattgaagtgtgaccgtgtaatttccattctcaagtccaatgccatagtatctcagggatgatggtgacatccttgctgtttggaacagtgcagagtctagggtgttctcgaactggcgtgaactgtagatgatgtaacttgcattgggtgcatctgcgtccaagaataacccaacgctgctaacggcccatgtaggtgcacccgcaacatagtatgatgcagcactaaggttggcattatcagcttgatagacagaattatctgaacctgatattgctctactaccaccacagtccaccgcaaaggacgca

SEQ ID NO: 98 - DNA, 728 bp, Zea mays
tgctcctgccgtcgccgtggctgaaatccgaatggcaatcccagcagaagcatcaaactgagcagcatgatcaaaggcggaactcggaacggctgctatgtatgattcgagacgtacgtacgtgatgggttatgttgcgacgttatgaagcgtgccacggtctgcaagaggcgaagagcagcaggtgcaggtcgcggggtgcgtccgatgcgatcccgatctgctagctgccgcacgtcaaatcgagaatggatctggggtggggggtcggtcttcggagtaacgcgacgatcgatgcatggcacgagagcggggggagacgagatggccgcgcgcgcgggcgcagtatacgtaccacgaacgcgtagccggtgacggtggcccaggagttgccgagcgtggcgccggcgaggtggacgtcgccgagctggcccgagaacatcaccgacaccagcgggatgccgtagtaggccatgctggtcagcaccatcggcaccgcgaaccccagggatcaacagaaatggatgagtgtactgtgtgtacagactacagagcagacgaaaacctgaacaagagtaagtatcacttgaagcaaatttaacctcttaacgcatggggaaggagacttccatatatttctccatcccaaacaccacgtggatgtcaataaggcatagggtcgggttcctatgaatttctttcaaaaatcgtcctgtccggaggagagc

SEQ ID NO: 99 - DNA, 635 bp, Zea mays
ttggtttgggaagaaaccagcacgcatccgtcgctgtcaggagctgatcagatcggctgctggagttaagacggacggacggcgtattatggacggggaagattcctgatgagatggcgacaccaaaactgaaagccacgggcctggatcctcttctctctctctctctgtctctctcgattttctcccggattttcatattactattctctactagggatggatggtgtatgtacacaccgatacaatcaaggaccgtatcagcaggttgaataataacaacgataataatctactgacacgcgcaagtattttggggctaatcatcggggtggatgctgcatgccgacgaggagatcgagggggaatcggactcgtcgtcgtagtcgtcctcgtcgaagtcgtcgagatcgtcgaagtcccacagctcgtcttgctcctcctcctcgggcatctgccactgctcttgagaaatctcgccggactccagtagctccaccacctgcccattggtggccatgtgaatccagtcagttaagtaccaacagtgccaaatttaataaacagcactggagcttcaattgaccggtccagccgtccaggtccaggaccaggagtaacctctgccaacagca

SEQ ID NO: 100 - DNA, 604 bp, Zea mays
tgcacaggccttaccctcagcgactacaggagatatagcaccagcttctgaaggaactgtttttgcattatgaactggagctgtttcaatttccatcatatcagcacttttgacatcatcatactgcaccacaggtaccttaggagaaccaatgagctcccctggttcttttatcatatcagatgtatcacagatctccacacttccaggaaccttggatgtcccactagagggtgaaagattttctgtatgtgtcacccctgtgggagaaccttcaagagtagttgcagcctcagtattcacagatttaagttcgccttccaatgaatcaatctcgagttcagtcttttcaatctccttggaaatgctttccttcagtaggagcagcttatatgtactggtcgggccatttgaatccccagaacaagaatcctcgtgctggataagttcaacaagcatgtttccaagggaaataacaggatcatcaccgagctgatctaacttgatcggaaattcattattgaaagttgtgtcatcagcctccaagacatctttagtagagttagtgaccgcatttggcatcatttcacaagatttatcttca

SEQ ID NO: 101 - DNA, 608 bp, Zea mays
ggggggcttgctgcttcctgcagccgtctctagaggatccccctgatagtcatagaagggagctaagagcttgttcttggctgcttgaccgattcttgattgagctgctgcggatcttggcaaagggccaagagcttgctgtgtctggaattcttggtcagccgtgccggatagggtgagggtgccatgacagcatcgcagtcctcgatgagcggcggcggggagccggggatgcggacggtggtctggttcaggcgagacctgcgtgtggaggacaacccggcgctgtcggcggccgcgcggacgggcggggaggtcgtgccggcgtacgtgtggtcgccagaggaggacgggccctactaccccggcagggtgtcccggtggtggctcagccaaagcctgaagcacctggacgcctcgctccgccggctcggcgccggccgcctcgtcacccgccgctccagcgacgcagtcgtcgcgctggtcgacctagtccgcagcaccggcgccacccacctctttttcaaccgactctacggttcgatcccccctctctctctctctctgctctgctctaggtgttgttttacgccttgttacatgttgca

SEQ ID NO: 102 - DNA, 678 bp, Zea mays
gcgtttcccacaggccacaccaatgcactccaaacctggtccggacaaccgtacgcgcgtcatggaaagaaaaaaaaacacacaatgcacatctgtagatcatgtcccattggtgatgttctgactgtcgtaagggtagcagtagcggtaaatgcagaaattatagtggcttaagcatatacgaaaatacactgatcctagcaagaagcactcaacaaaccgacggaaatagaagccatgaaagtaaacttccatttagagtaatgcgtaggcgaatacaaagacagcatcgctttttttttacaggagcaaagaatagggcatgaacaaaacagaaaatgggaaatgctgtaggaatatggatgaattgatcattgtcatatacggagtacatactagtattccaaagagagtcaaagctgccacagcaactgagattacagggggtggtggtactacatataacattaccagccgttcattaagcttacaacatcatgaacataaaaaagcatccacaatcctggcaatgccagcgagaaatcgaatggacataaccttaataaaacagaggttcatgacttagagcaaggatcacgatatagttaccatgatataggaggaacagaatagaacagccgacgaacaacccagacaattgaagcatgaactcttcaa

SEQ ID NO: 103 - DNA, 462 bp, Zea mays
tgcagatctttctctgtgttcttgtcgatgttgacgctgaggactaggcttctccggcagatgaactggagctctggtgttgcgttgtggaagcctgctatcttcacaatatctcccagtctgtatcggtatagaccttcacagcccaatagcccatatcaaaaagcaagaacattaaacatgtgccatttcgatggagaaacatacaaacttccatgcaaaatcatgaattggaactgcagtgcttgaatcctactggagaaacagataatgtatgtacctgcaaaatttgttattacaacttcgtagattttgccaacctcaacctcagttaggcctacaggctccgactctatgtagtgaacagaggaacagatctccgtttcctcccattttggtttttccagaggaatgaactcgaaataagcaatgttaggaagaacagcgtacgtcacctcctca

SEQ ID NO: 104 - DNA, 450 bp, Zea mays
tgaaacgatagctttatttatatcactattggtacagttagatagaaaagtttcaggcctcaatcctaagtaaccgaccccttacatatttcgaacttctatttacaggcctaggcaacaacaagctacctatagtgcaccggcagagcccatgctcgccgttgcacgggctgccgtccctaacggcggcagatgtcttgcgtcgtgacacctcccgcatccggcgccgcttcgcctcacaatcgtccgtggtggcttcttttgcgtcggccccggccccggcgccggcagccaccataatccccctagacggctcaccggacgcgggcgcgctggactacaccgtgaacgtcggctatggcacgccggagcagcagttcccgatgttcctggacaccatcttcggcgtgtccctggtcttgtgcaagccgtgcgccccaggttccagca

SEQ ID NO: 105 - DNA, 560 bp, Zea mays
tgctccttagtgattccgatgactgccagagagcaagcatgcattcagatattagaacatgctctaacatgacacaacccacatagaaaacaaaaaaaaactatgtcaggcttacatttctcctgctcctgcgctcgccagccgatgttctgctccttattgactcagatgactgtcagagagcaagaatgcattcggatatgagaatatgctccaccatgaccaaaccagaatagaaactagatttatgcaatgcttacgtttcgcctgctcctgccctcgccagccgatgtcctgctgtcccaggtcaacctaaaatgagtgacaaactgtgatcagaaatttgcaatcgagcgaaaatcataaagcacctccttctgcttgtttgtcgacatcaaccaacctgacggtgtttccatctagcgaagagcagagtctatcagaccctgcattctggaaatcagccgaagagaataccgacaatggtgggaaccccagattactctcagactcctccttccacagggggatccctctagagtcgactgcaggcagcagtc

SEQ ID NO: 106 - DNA, 551 bp, Zea mays
tgtattcaagcttctgtacaatggtcaacctgcttgcttggcacaatctcctcagttgcacaagcagatggctctatgtggtggttttgaacgagtatttgaggttggccctgtgtttagagcagaaaattcaaacacacacaggcatctctgtgagtttgttggtcttgatgctgaaatggagattaaggagcattattttgaggtaagtttgtaagaagaattcaatatttaattgtctgaagcagtcattattaattacaacttatacacaggtctgtgacattatagatggcttatttgtatcaatatttaaacacttgactgaaaactgcaataaagaactcgagacgataaacaggcagtatccatttgaacctctgaaggtaagcattcttgcttgtttgtaatttgagtatttgactatgcagttctatggttctgtagcctaagagattgacagatcacttataatgttatgcagtatctagacaaaacattgaagctcacttatgaagaaggagttcaaatgttgaaggtacaaacttgca

SEQ ID NO: 107 - DNA, 480 bp, Zea mays
tgtttggtactcctacttcggtgtagtttgatctttgacgatattccgagccttagagctactaatactaaagctaaattcatgcactttaggggcatgttcgaaaactagttatgggtgaaatccggccttttggtgcttatttaagatattttgctgctgtcagattctgcttgtgaaacacatcgaggacgtactcgaccatgctttcgaaggcggatgtccacttaaatcacgctccaagttatagcatccaactcgcctttgctatggatatttgcttcggaggatcatcgtcaacagtaccacgaatgatcaacagtcagaataagagcctagctctcttgccagcacaggtcttgacacgcccattttggttaggcttcgcatctgaatgtgtatactggtcagaattcggagagcagtcagaagatctgctcgttcacctgctgggactcattgcatagtttctcgacacca

SEQ ID NO: 108 - DNA, 587 bp, Zea mays
attcgagctcggtacccctgcctgcaccggtcaccggcctcgaacgcctcgaggcagaccgcgcagtccccggtctcttctccgtctgcggcagccttgaagtactcatggcaaggaagcgtagcgagctcgccgctggacagtccccggcggccgcggccgtcctctacgcggtcctcctggttggcggcgtgctggctgctgccgcgggagccgagcccccgcagcagagcccagaaaacgacgaggatgtgggcgacgagcatcacagcgacgcccgcgatgagcagcaccacggagaggatcgcggttgggttggtcgtcgtcatgctgttgctatggtagcgcgttgtagctagctagtgatgaatcatgtaactaagggtcgtgtttctcatcgatcatgtgaagatttctcttgcttttgacgttccttggtttggatttggatacatatgtagaccagttctagtacatgtgttgggagaaaccaaagaagtgtggcgacgacctcttattgtcatttcagcactgtacgtaggggatgtgcgtagctgcgagtcactgatagctacaagcaagaaaac

SEQ ID NO: 109 - DNA, 558 bp, Zea mays
tgcacatgcagttttagccgctcctttctcatgatcaactaccacatgtgacacacgcgcttgtatattttagatgcggaatcgctgaactctgtactaggtgagcttcgctgatgctaagtttctagctgtgtcccaaacctgtttactcaggctgtggattctgcttcacctcccaatcctttgacatctgctccgaagcaaagtcagagcgctgcaatgcaaaacggaacgagtgggggcagcagcgcgagcaccgccgcgccggtgtccggacccaaagctgatcatccatcagctcctgtcaccaagagagaaatcgatgccagtgcggtgaagccagagcccgcaggtgatgatgctagaccggtggaaagcataggcatcgctgaaccggtggatgctaaggctgatgcagctccggctacagatgcggcggcgagtgctccttatgacagggaggataatgaacctggccctttggctgggcctaatgtgatgaacgtcgtcgtggtggcttctgaatgtgctcctttctgcaagacaggtaggttgcat

SEQ ID NO: 110 - DNA, 514 bp, Zea mays
tgcaaaactccaagctgtctgtgcagggaagaacagtggagtatagatacatgttcctcatgttctggatcatcatcattagtagtaacgcgcatgccattggtccccggaatgttccgtttttacttgaggggaaatggactcagatctccctcttccatcacgcatgtaccaggcatgcatcatcagctcatcttgcattaatattgctatatatataatccaactacagtatctatatctatatatgaatgatatatacactgcatgcatggctttcctctggatacgtggtatttcatgtgtatggatgctttcgcaatacccttgcttcaattctttttctctttttccttgtacacctttgtcactcagattccatctgctggatgagttcgacgatgctaagaagagctgcaggaaacgcctagcggaccacaaccgccgccgccggaagtcaaagccatcggatgctgatgccggagacaagaaaagggcacatgcgaacaaagca

SEQ ID NO: 111 - DNA, 558 bp, Zea mays
tgctcgggtccggcaacctcgtcgtgcgcgagaagagcagcagcgccgtcttccagtggcagtcgttcgaccatccgcagaacaccttgctcgccggcatgaggttcagcaagaacctaaagaccggcatggagtggtccctgacgtcgtggcgggcgcaggacgaccccgcgacgggggactaccgtcgtgtcatggacacgaggggcctgccggacatcgtcacttggcacgacaacgccaagaagtaccgcgcggggccgtggaacgggcattggttcagcggcgtgccggagatggactcagggtacaagctgttctccgtccagatggtggacggcccggacgaggtcacctacgtgctcaacaccacggccggcatccccttcacccgcgtggtgctggacgaggttggcaaggtgcgggtcctgatgtggctgccgaccagccgggtgtggaaggaatacccatggctgccgcgcgacgcctgcgacgagtacgcgtcctgcggcgcgttcggcctgtgcaacgtcgacgccgcgccgacgccgtcctgca

SEQ ID NO: 112 - DNA, 508 bp, Zea mays
tgagggcggatatgtacaaggtgtacgtgagtttactacactacctatattgcaatattatatagactggtagtcagagttgtaaattggtaatcatttgatgactaaaataaccattttttatatgctatggaaacaaacatctagctgattgttgagaacactgagatcctaccaggtttgaggtcacgatgaaagtagcccctctggtgcatgtatgcaagagcctgaaatatctgaaaacaccagttgcggacttcagactcggagaaaggcttgaccctttctttcataagttgatagagattacactcctataaaaacaagggttcagattcaagaacacaataatggtgcagtagaatatttgctatacataacatatttaccatgtattccattatgaagtataatatatcattttccctgataacctctttgagcttcacaatgttaggatgattcatgcgccgcaaagacttcaataaaataacaataaaagaatata

SEQ ID NO: 113 - DNA, 489 bp, Zea mays
ctgagcacttgtcaatttggaaggccttgttgaagacaccagcatcaattgttctgattatctactgttttctttgtgtatggtttgtgggtggtttatctgtcttccatttgtacctgatgggcactaaccaggtaggtccaacattgattccagttcttttgtcattgatgctgcaaccgcagttcagtagcctaatccttcatccatttttccttgtagacaacatacgagaatttcaggtatcgctatgaccggcgcgataatccatataacagaggtactctgaacaattttctagagatattctgcaccgctatccccccttcgaagaacaatttccgggcaagggtgacagtagagcaagggctgcagcaaacgcgctcacagtctaggggtttcatgagccccagcatgggcaagccaaccattggagagcttgagatgggcaggaagccagtagtaccttgggacgagccaaggacggca

SEQ ID NO: 114 - DNA, 514 bp, Zea mays
tgatggatcctatgcagtcatcggtgagaggccgcaggtcttcgttgcatgctgatgctgtcataactattggaggagtgcgacctgcaccacccccacaaacatccacacaacatgtatgtcaagatgaggcaatggtcagcagcggggatccctcttggatgtctggttacaggtacgcaatccaggttcagcagtcaatcgagttggttggttcatgtacatccctatcggacaaaccaaatcccatgatccaactccatttgtttgtccagccaaaattcacaaactaaatctatagctccacaaccctaatgctagttagttcatgcatatatcactgtgtgcttttattaagactcatagtactattttggattaaccacggcatcaatggcagtgttccagccattgagttgcagtgattcagtttttgttttctacggcagagtatagcacactactaatccgaacatcgatgttggtggtgccagttgattagcactggtaactt

SEQ ID NO: 115 - DNA, 481 bp, Zea mays
tggaggcgagccgggccaccatcgattcgctgctcaccgacgggtccaagctgatggactcgttcagcctcgtggtgaaggagctcgaggagtcgcgtgccaaggtcaaggccctcgaggacgagatcgcggagacgtcgtcgagggccgcaggcgaccactgcagttgctcgggctcggagtcagaggcctccgagctgagggcggagctggaggccgcggaggccaggtaccaagaagagaagatccttagcaccgtcgagacgcagtgcgcgtacgagctcatggaccagataaagacagagtccgacctgcggcacggcaagctcgcggcggcgctcgagggcgccaagtccgaggtcatcttcctcaaggcgagtctgttcgacaaggaatccgagctacgtagtgccctggacgcgatcaagaagctacaagcggagacgagagcagacggctcggccgacgcgctgaagcagca

SEQ ID NO: 116 - DNA, 510 bp, Zea mays
taattcgagctcggtacccctggtcgatgatacaattgcaaatcgcaacatcaggattgatccctttctcccacatctgtttgaacagcttcaccgcggcactaattctgccatttttggccaatgcgtttatgaacgtaccaaaggtgaataggtctcgttcaaccttagatgcaatgatatcattccaaatcctttgagcgtctctcaggcttcccttgacacaccaaccatttagtataatgttccagctctttgtgacatgcgggaactcatctttcttctcacggaacagcgcctccgcctcctcaacatgcttataccggcacagcgacatcattagtatctggaacccgaccaagtcaagctcaaacccgtaatccttcctcaagtagaacacctctatcgcctcctgcaccttgtgcgcaccagcgtaccggttcaacagcacggcaaacatcttattcgtcacgaccacctgacgtcgctcctcaggaatctcgtcaaaca

SEQ ID NO: 117 - DNA, 436 bp, Zea mays
tgccaagataactgaagattctacatttgataatgatgtgttttctttccaaccccacttaggttctgaacaaacagggttctctactgcagaaaaggtgatttccttgattgttagtatctacctgtattttccctcctttttgcagtgcagtgttataatactatttggcttccctctattgccaacctcactacaaaatttcctctttttgtttttttggtacaaagcactttttaattgattcatgtgccagaaaaatgttttttatctacaggactatggtgcctatgagaaaaagcagtccttgtcgaatattcatcagcaggaatccagtcttcagtcaagctttaccgcagtcaaggataacactagtgcaacaattgttaaagcgaagccatcttctagttccatgttcagtgatagtcactattca

SEQ ID NO: 118 - DNA, 496 bp, Zea mays
tggggccctaggctcaagaaattctctgctgcattgcatgtctgcacctccaggtaggccagtacaagctccggcaagcaacaagaccactatctcctaccagcaagcagctacaatgcgcagtgccgcattgcaattgcaccacacaacctgcagagtatcaataccaaacagagacaaaaaaaaaagaaattgttatcattaacagttcaatctgcacagcggatgcaactgagccatccttcttactgttcaactttcatattcagcaaagccaacggaatcatttacatcctttacctcgttgacttcttaacaaatgaattatatctgagagatgactgcctcccacttaacaaattgggcaaacagccacccctgttctagcaccaattttgctgtacatgctaaagggatgcaatataaaataaaaaacaaaagaaacaatctccacctttcaccattctgattaaaatgacatgctatgaaatttaca

SEQ ID NO: 119 - DNA, 659 bp, Zea mays
ttgaagcttttgtacaattaatacaaaagctaatctcccggtagattagccatctttaggtgcaagaagcccaacaagctttcatcactcttcgtgaattcgtcttggctgaggagtatcatcttgcccagcaaagtacaccatgacaaacagaagggcgatgacaaatataaggatgtacagcgagttcaggctgaccagagagttcaggaaacccatgaaagaagggccggtgattttcttctttgttgttcttcctgctctgtatccctcaaggaattggcttatttgagatgcttggtcaccttcttctaatctctctgaaccatccaccttcaccaggaaaattcaatacataaaataatgaattcttatttaatgattatcagagagacagtagcagtttctatcttaatcaactattaactttttcagggaattatgggggtaaacaaacaggaacctataaaagcaatacctccattgatagaaaaaccgtgccatcactagtaagaaacatgccagtaacgcagtggtttttatatggatgctggtattagaaaatatataattaactactgaggatgctttacttactagctcatactcctcatctctatcccacacaagtagctttggcaggggtaccgagctcgaat

SEQ ID NO: 120 - DNA, 626 bp, Zea mays
tcgagctcggtacccctgatatagatgacgaccgacaagttgggtaagtgcataacttacagctcatcctcagcatccctcttccatactagtcaatatatttttcctaaactgttccaaatgatactgatacttgaaattgatgtgtacagtgctgctgaatttgtactttacaagctaaaagagctgggcaagatcagccaagaggagatatcttgttttctcgaggagtttgacaagcttgatgttgaccagtctggcacactctcaacttacgaccttactctaggacaaacaattcaatgactgatgatgcatatgtgattttgctgactgaatgattttgtttgatgtcgttagcatttctgttgtccatatgtaacacgctataatgttgtaaagatgtaaattaagatgattgagaaattgtgccccaccttctctccaaagcaacttgaatcaaggctgtaaagaacaaatacttgctggagacagagacgacatacctgcaaatttatgattggtttagctctgcccctcatgccgtgtccgtgtttccagcatataatgtgaaaattgttatgtagttgtgatgaatactttgacttgttaccattggctctgca

SEQ ID NO: 121 - DNA, 597 bp, Zea mays
tgccaggtaacggccacggattccatcactggaccgcctgtgtcctcgccaacagcaacccgcacgccggaaggggggttgcggacgccttcagattatcttcaaccattcctcctcctaaatcctacaatttatactttcagtttatatttaaataacacttccataactatatattattcatatgaacccaacaacaacgccgacgcctatataaacgtagttcacccacccaaagttgcgtgcagcagagcagcgtcgtatcgtattccatcctttgcttctattccacttcaaatcacaggcggccgcgcatccatccactccccccctctttcctgtcgcatcgcattgcatgctttgctccccacgcaatcaatcggagatcgatctcgtttccctctcttccttctcctatacaataccctgctcacttcttgaattgctccgcgccgaaacgcgcgcatgcaccccatgaacatgacgagctgcgaattcgccgccgtccgcctccctggccacccggcgctccggccgagccgcagtcgaccatctccgacgcccccgccgccacccgccgtagccaataagaaacca

SEQ ID NO: 122 - DNA, 584 bp, Zea mays
tgttatgaatggcagattgatttctgtctgagaagtcgacgaaagttcaacctttgccttctcagcagcttcacgaagcctttgcagggccaatctatctttcgacagatctatgccctcagttttcttgaaatcactcaccaagaactccaatagtgtattatcaaaatcttcaccacccaagaaagtatcaccatttgttgctttgacctgagtagcaatacatagaatcaaatcagaacagtgtgtaattcagaagatgtttccacaatgaaaaaaagagtgattcagaaaacgtttccacgatgagttcacttgaaggttatggagagatacctcaaaaactccatttgagatctccagaatagagatatcaaaagttcctcctccaagatcaaataccgctatcaagccttccttgttgttcattccataagacagagcggctgctgtaggttcattgatgatcctttcaacatcaaggccagcaatgcggcctgcatcctttgtggcctgacgctgagcatcattgaaataagctggaacagtaatcactgcctttgagatagacttgccaaggtaag

SEQ ID NO: 123 - DNA, 675 bp, Zea mays
tattcgagctcggtacccctgctacactactattccctggcaaacgcattacagccgcagtactgctcctttggagcttccctgtcttgatcgggtggcgtcactcgttccatacttccatgggctgctagctgaacgctagccgacgatcacgactagacctggtggtgctcctgatctgtactgtacttcttttttgagcgaaccaacaaagcggcgagaagctctccaaaataaagccgctcgacgtacgcgacagcaacgtgtgccccctcgccgcacatctgcgtccaccaccgcatagcatcatcagtcggcatcatcattggatcgaactccaaagctagcactgcaggatgtacacatatatatataaacatcgtgagggagttggttgcatgcagtcgtcttgcttgcaggtagcgaggatcacacacacacacacacacttccttcagtgcgcgcactactacctgtcagtgagtcactcagtcagtcagtcagtcactcactcgcttcctcttcagttcgttcctctcgagaaccatatcccttttaattcgcatattctccctgcgtcgaacagcgcctttgcatgcgtctccgatcccttccacaccggctgcgccgccatctccggcgctagcgctactacggagagagatagcatcagct

SEQ ID NO: 124 - DNA, 598 bp, Zea mays
tgctatttatacgcctcgccccgctccagtctcagcagaaccaccagtcctccactccatcttctactccgaccacaaccacagcgaccacgaccgtgcacgtacgtacaggagcacaccaggcaacggcaatggaagcaccacgcccgcgtctctccatcgtcgccgcgctgtcggcgtcgctgctgctcgtcctcgcccacgcccacggcgcttcctcctcccccgctggcggcccgacgcccgtcgccgtgcggccctgggtggcgcggctgcaggcactccacgacctgtccgtgtccggcgagcagcagcagggcggcgggttcggggagtgctggggcgccgtgatggggctgagctcgtgctacggcgagatcctgctcttcttcgtcaacggcgagtcgtacatcgggcccgactgctgcgtcgccatccgcggcgccacgcgctactgctggcccgccatgctcgcctccgtcggcttcaccgccgaggaggccgacgtgctgcgcggcttctgcgacggcgaggaggcggaggccacccgcgcgccgccgcctgctgtgcccgctcctcccgcccggggactgggcca

SEQ ID NO: 125 - DNA, 616 bp, Zea mays
tgcacgtggttcctgtgacgaccgcctcaagtcaagtgggatgggagctccaacgttttccatttgccacacaggtagtgaaggcgagtttggcgtgtgtgctatgccgatgccagtgcgtactgcgtagcctagtcccgtccatcacattgcagtttcaattgtcaatggaacacatatatctgcgtagtttccttcactgatctctatcggtgcatcatcaaaactcaaagtcagagtaatctccactacaaatctcgagaacaaatgacaatctgacaagaaatctaacgtacgaataactatttccttcttggcacggctgtaactattacgtactattctttttttattatttgaaatggtgtacaagtgacatggtacaacacaagagaaccccaaaaaaaaaactttcggtgttttcttgtgacatcctcggtacagtcacccaggtgacagatttgcagtcaagaagaagaggcgatgagctacggacattttcagtggtaatcatattagaccagaagatccgcaaaaaaaaagttgccattgctggacagtaatagtacacattttttttccttcctttgctaagtcatacgattcaaaccgcaga

SEQ ID NO: 126 - DNA, 601 bp, Zea mays
tgctttcatcattttactagctttctgcacattccagttccttgctcgaagaaatcgcactaacgaggcatctgaaaggaagtctttaatggcttctgatgagtgttcgccaagctccttgcgtaattcatttatctgctcacagagacacagtgcagcaagttagaacttactagaaagtgcttaactcaatcccagcagagatgtctaggtaaggttgctcttactttttctcgctgttcttctggggatgggattttttcagtggtgccgccattgctagacttgaatagaaaggacattagagtagcttgaaggaggcaactccactagataactgcaacccgtgcataaatgcaattagaagaatgaacatacataaaccaatttcaatcgtctactctgcaaaaagtcaaaaagaaaagctaacaaaataacataaccaaaacttaacagaattattaaagtggtggtattcaggtaaataacataacgcaaagatctatatagccttgctctcatggcctcagtgcagacaaaacaaaaataatctagggataacaaatacatagagcagcatccagggggatcctctagagtc

SEQ ID NO: 127 - DNA, 583 bp, Zea mays
tgccgatgatgccgatgacgcccacggcgagacgctggagccggtccgacgccaacaccgtgctccgcgtgctgtgctaccgagacgatgagcctgccaacagattcttgaagaaaacctttaatctgcccaagaggaggtagccgattacgcagttctatcgccggcccataggatcggattggatctatcattcgcgacccaaagggcctgttcgtttctgttgggtttcacaaaaattatttcggctaatcaaaccttatataaattagacaagcaatctacgtaggaattgttccgagtgttcaattctctggaaccgaacaaggcctaatactttttttgaaagcacgttcttattatacacatgtaacaggaaacaggaaagcacgtagacggtggtgtaggtttggtgaggtgagaaacgggaggtcttgcattcctattgatttttcatcgatctgtgttgtttttatttacaccattggccgatattatttaatgatgtcatgagccatgtggtatacatgagcatgcatctccaccgcacctaacatgttcatgttagggctagttcgtttca

SEQ ID NO: 128 - DNA, 591 bp, Zea mays
tggaacacccatcagccacacacaaccggatctcaagattgcttctgtcatgtggtggacgagagcaatagtccaaatacaaatagtctctgtatttaataagaatgctgctccaaggacaaaacccatcaggagatccacaatgatacttgaccacaaagcatgcttccgaattgcagctttgtgtgcatattcaacattcacagtggagctgagccgataataattaagtgaagcttagtattttcaataatctgcacttgagcatatgataactactatgtactaaatgtaaatgcacttaaatattcataatacaaagattacatgaaacaacaaaatggaagtgaaccagtaaactctcttttgtatattaaaataaccatgtaagattagtaataacagaatcactatgttattgcctttgtatatgttaatttataaggatagcacaaaatgttatgacaatatgacacaatagatattaaacaacgactaaagttacagtgcagattaagaagttacggatccactgttaatttaccttaaggaagcatcttggaagacaattggccagtagagaatttgaca

SEQ ID NO: 129 - DNA, 655 bp, Zea mays
tggaatccctgggtttccctaccattgctcaggctttggggaatctcaaagattccaaaaggtcttgcaaggtcaagaagtgtttcatcctttccgaggaggatgtttggctgatggccatataagaactgctggcatgtatcaacctgacggtaggcatgtatctggtgcagcttataaatggtctgcaccacaagggtatgatttcccacagccagcaaaaccggtttttctgttgcaagaatcatccccatcatctgtgatgatgtttccacaaactagatctaagataactcacttggaatatgagtactcaagacatgaggatggtagacttgataggactgttcctactcaagacatgggaagaagcaatcaaacattatctctttggcctcatcttgtttcaggcgaagcaatagaagaatgtactggaactgtgaatatgcactcccccgtcagtggtgcagagcatgaatcaaacaatgagagtacagttgaaaatggctgcaaaatctttggtatctcattggctgaaaagatccgatcatgcgatgaagcagactcttgtagtgcaaaatgtaattctcggctccagcctttgaagtcacaaatgccaaaatcgctaggcaggggtaccgaggtcgaattcgta

SEQ ID NO: 130 - DNA, 609 bp, Zea mays
actctagaggatccccctgggaagcaatttcgaccagggaagctcattaacaggaaatgatgccacagccagtgaaattgaatgtcacagactccaaatggctgcaataaatgattatggatttggtaaacctgagattccttctagttcctcaatgccatttttcttggctgttgatcctcaacaactgaaattgagaaatgagacaaatgtttcttcaacatcttccaacattccttcagattctgcatcaccaaacttgaaaaatggcacggatcctcttttgatgccatttaattcctacatggcagattggagcagcgataagataacttacaccactctgaacactccaaaaataagcacagaacttccaggtcagtatgcatccctttcttctattattagctaaatcaatttagctgacaacaaaaacttaaccatgcagtcaagttacaccatgacaaaagtagtagctttgaagcaccaaacctgaaggagcatgaatcagtctttgcaacacatgaaatgacggtagaagcaacaagaaaagaagacgaacacacatcaaaatctagttttacttcctacaatggagtaccagataca

SEQ ID NO: 131 - DNA, 771 bp, Zea mays
atacgatatcggctcggtacccctgctgaccgagtggggggcgctttctctcgagtccctcaagaaagagctcgcagaggccaacgcgcaccgggacgccgctctgcgcgaagctgccgaggtgaggtcgtcgctgggggagctggccaccaagctggtgagcgtggaagcgtactgctcggagctcaagaaggcactgcggcaggccaccaactcgccgtccgtctcgcggagatcgacgagatcagtcgaagcaagacgagagctcccgacgacggtgagccacgaggtaatggtggaaggcttcttgcagatcgcgtcggaggcacggctctcggtgaagcagctctgcaaggcgctgatccagcaggggaacgaagaatcctgtgacggcctgtccgacaggctgaacctgctcctgcgcccgtaccagctcgcgctcagcggcagcactggcaagcactgctcgaaggccacgctgtaccatctcgaggcgatcatgaaccaggccatgttccaggacttcgagaaccccgcgttccagcggaacggctcgccaaggtgcctcgacccagcggaggaccgccagcagagcttcgccgccttcgtggcgctgcgcaaccttagctggaacgaggttctgcggaagggtaccaagtactacagcgaggacttcagccgtttctgcgaccggaagatgagcggcgtcgtggcgacgcttggctggtcccggccgtggcccgagcaggggtaccgaggctcgaattcgta

SEQ ID NO: 132 - DNA, 793 bp, Zea mays
  misc_feature (756)..(756): n is a, c, g, or t
  misc_feature (759)..(759): n is a, c, g, or t
  misc_feature (778)..(779): n is a, c, g, or t
aaagtaagcaaaactaagctgaaatctgcaagaagcagtattgagattaccaaaccaacaagatcctgcagttaagttcaacagaaccaagatcagcattcagcacaaaatgaactgattcataatcactctgtggacagtaacagtggcagagaaagacctgatgcccaactggtttcgaattgtgcaagatatgagaaaatgggtaaaacaaatctctcctgtcttttagtgtccttaagctattactattgagaactccaccagtgatccttttgcgcattagagcatccttaatcctggactgacttagttgagtatcagcgagcatgttctgtgtgctgcatagtataataataagccatcataaataataatgatgataaacgaaatcaataacataaaacacataataactcacgtgttctgtgtgctgcgtagtataataataagccatcataaataataatgatgataaacgaaatcaataacataaaacacataataactcacggtgtgtgttgctctatttttactctagggcttccatcaggttcggtaagtgcagcttctccttcaacagcataaacaagaagaccaagttggcagtaccctaatgctgtagcttggaaccaggcaagatcaacacggataccattctcagctaaagagggatttgcatgagattcaagccagttgatgaccggaagaaacgttactttcagatttccaccacggaccaaacgcagggggatnctntagagtcgaacctgcaggnncagcaagtcatagg

SEQ ID NO: 133 - DNA, 753 bp, Zea mays
tgtgacctgcaccattgcagtcctctttgtttgttcaaattagattttaaactccacacctcatggaatttgagtatttcagggctttcatgattgaaaatgtaccccaaattagcttataccccgaatcgtatggccctcttctgactggtgaagaagaagtaattggaggtgctggaactcgcaacgcgtttccttgccccatttctcttatttgtcggtaactactaatttctattgtgctgacaaggaggcatatcaagcattgacaataattcctctgttgcgaaatttttttggatggaggctatgcttgaaaacatgttggcatgttgcctttatacagtgacaacattgacttcgctgttaagttttcttagctttcaaaatgcatagaaagaatctctcattttcttttgatcagaagaatctctcattttccatatctctatctcaggtgcatcacatcatcttagccttggatgtcatagatgattagtgtgaatggttgcccatctgctagtttctgggttccctaagacaacatatgctcaacatctcgcaggaagaaagagagatggcacacctctatgagcgcaggaagttcccgtaccctggcgatgatgaggcggtcgaggagtttgtaaagagcggaggtgctcttggaaccacaattggacccaggggattcgctgacgccaatatggattctgaaaacatgcagaagcaggggtaccgagtccgaattcgtat

SEQ ID NO: 134 - DNA, 680 bp, Zea mays
catactcctctcagttctctgtattccctcctcaaaataaaccatcctaatccaacaaacactacctctgccagaaatattgctgacaagaatccatagaagtacagatactttgatccactatgatctctcttaagcttatccagaaaatctgctatgaagtatctatttgttgtaccacagtcaggactatacttgggaccaaaaggttgtgattgcggaattgaggcatccaacacttgtaatccattaggaatcttgatgtacatggtaccagtactaacaaagttctgcagggttacaccgccaacaagaacagacttcggatagcaatcaccaatcccttcccagtatgcaaaacccttgcagttgcaatcatgcaggcactccttcttgcaaaagtcaagagaaacggagtgatgggcagtcatatcataccccaagaaatcagtgtggggtagcttagcaaaatccaccttctccacatcacaactgatgttggtctttggtctgcagcctttgctccgctcacttgggtcgatgacttcaaaaccaggggcacacgcacaagcaggcacaggcgtatacacacaaattccgttttcgccacacagaccgtgtacattgcaaagctgaggaaacgccatccatgtgaccgaccatgttctgtctgccacatt

SEQ ID NO: 135 - DNA, 763 bp, Zea mays
tgtaagttatctacttatttgttccctattttcatttatttatttaaagttgagatttatccaaagtattgttagtgtaatgttttttcttctgccacattaggtttttgtcaatgcacggcttcatgtctcaggaggggctcttgggggtggtcgcatggtagaagactcctcaagcgttgcaggttccatattttaaactttctttgatgatcacatttttgtagtattctttttttacgtaaaacaattctgtggtattcaatagcaaattatacacttcttacaagtcaacatatagatttcactatctcagtttctttggaggttactagcagaaaagtaatttagaaatgattaatatattttactgaggttctcaacgttgtgtttttcggttgctggtaaattgctcatttgctgctatagttgattagtaaatatagcagtatttatgtcattactggttacttgtaatgcaaacctttttcattgaagtacatgttctgtaaaatactagaacatggtcagtactttcagcattggtcactaacttttatgttttatgcgagtaataatatttctatttccatgtttatctacttagtttccatgccatgccgccttttcagtattggacactgctgctggagtttggtgtgataccaaatcagtagttacaactccaaggacaggaaggtatagtgcagatgcagcaggtggtgatgcttctgtagagcttacacggcggtgcaggcacgca

SEQ ID NO: 136 - DNA, 1092 bp, Zea mays
cagaaatattatcttcacattcgctcataaaatataggtcagcaaacacgcacaccaaatcaaataaaccagatctatacatcactcaacttatattctctgacagtctgaaaatataataatttgtttacaatcataatatatattataatattataaaatcatatatataatttataaatatttataaaaaattttatataaacgataaaacacaacaaaaatatacatttctaataacaataacattattcaggttaaagatatgctgttctgctcacatcgcagcatagttgacacatcctgtgctgtaacctgcataaggtttgccacgggatcacatcagaattgagccatcatccaacaaactgcagcagggcgtaaaagatagtttgatcaggcaatgaaacctcctcacctggaagctcccatcaccaatgaaggcaatcacacgcttgtggttcgcaccctgagcatatccgagcaatgcacccactgaccatccaatcgaaccatactgcatttggaattcatacctgcagcatgcagacagttctcatgagaacccaggaacagaacagagttcaagagaaacaaacagaacagagcaccatcagaatgctcacccacagccttctggcagcttaagcttctggcagttgaaccaggagtcaccagtctcagcaatcaccgcactatcaccagtcaacatcttctggacgtgcttgaagagcacattcactcgcagtggctcatttggctcgctttccagcggctggccctcaggtacaaagatcctcttgtaattctcataggcagtggtgttcttattaaccctcttagccaattcagacaagaactctttcatcatacaccatcccgatgattgtgtagtatcattcatttttttgtgtttgttttttaaatcaaatttatttcttatataaactcattttctataaggtatggtttcggcgtgtcaaacttattgttttgtgttatgtttcggtgccggtcgtttggttgactgggtgttgaatgttgtcgaatgtactttttgagatataccaaatataacataactatacaaac

SEQ ID NO: 137 - DNA, 920 bp, Zea mays
  misc_feature (468)..(471): n is a, c, g, or t
  misc_feature (473)..(473): n is a, c, g, or t
  misc_feature (869)..(869): n is a, c, g, or t
  misc_feature (890)..(890): n is a, c, g, or t
tctaccagtacaaccctgacggcgccatctggggcaacaagatcgcgtggggccacgccgtgtcccgagacctgatccactggcgccacctcccgctggccatggtgcccgaccagtggtacgacaccaacggcgtgtggacggggtccgccaccacgctccccgacggccgcctcgccatgctctacacgggctccaccaacgcctccgtccaggtgcagtgcctggccgtgcccgccgacgacgccgacccgctgctcaccaactggaccaagtacgagggcaacccggtgctgtacccgcccccgggcatcgggcccagggacttccgcgaccccaccacggcctggatcgacccctcggacggcgcatggcgcgtcgtcatcggctccaaggacgacgacggccacgcgggcatcgccgtcgtctaccgcaccacggacctggtgcacttcgagctcctcatannnnanattgcagtcccaacccgcgcccgcaaacccagccctaagaaaggctcccccacagatcccggcaaggggcttcgtttggcttcagccaacagacagcttgggaggaggggtaggagccgagccccaaggtacagccatgatgacaacctcaatagaaagtgttaatgttaaacaaaagacggcgaacaattgccaaccacgatgtgttctaaatctatgatgatttgaaagcggcggcgccgaccgggcccagtctgtaacagagaattctgtaatacttgtatagctgattgtgatcggaggggggtatcggtggccggggactgcgtcttatcacgaggtagccaggattctcgatgattagatggttggacggcgacaagggcaaggatgagnaggtgagggtgaaaaaatgantcaaggggtgggggagaggggaagaggaga

SEQ ID NO: 138 - DNA, 1244 bp, Zea mays
tttaggcttgaagagtttgggagctggccttatgaaaaggtggtttgattatgccattcgctcccttagaatttttttaatatggttagaagtacactttttattggcttgtaaattctctctaacaatgcctgtacaatatttctcttctactactattaatatctagaacaataggggctgcccaaactgtagtgctttaaaaagaaacaatttcagagttattttagaattttgaaaaccattttattattatgaaagcaagttattttagaacattcaaacgcaaccaatgatttttttctgacatgaaaagttcattcatgttttgatgagtttttttaatgcaaattaactttggatcaacatagcaacttagcaagcaatttattctacaacttttttgttctcttttatctgaactctgaagtcttgtgttgaagtctgtgatgtgggaatagaagagctcaccaagaacatgttggttaacctttattatgtagtttcctcagtttattatttcttgatcccagtccctcgaagagctcacaaagatggcccataatttctatgatgagactgcactcccaaagctggtaagccttgttttagctattttgttaattttctttaaaattttgagtcacttatagcaacattcgctactttagctatcttgtcctgatttgttctttaattaccctatataaaactcttgttatggtacatgatgttgagttagtttacttaatagtatcagagtagtcattctcaagcatatatgatcttgggatgttttattcccatagtacttaattcattttttttttcttggaatacatttcgtacaggtggctgatttcgcgtcccttgagctttctcctgtggatggaagaaccatgaccgatttcatgcatacaaggggacttaatatgtcctctttaggtcgtgtggtgggtgtaaattttatgcctaaatgcttttcctactatgtttggacaaagttgcataataatctgatattgtttctttatattaatcaggtagagctagcagagaagctcccacacatccagtctatatgcattcatgaaatggttattagatcctttaagcacatcgtccgagctgttattgctgctgttggtgacatgcaaaatatttctgcagctatagctgaaactctaaacatattacttggatctcccagacttaaaaggtgctacacagatgcccatattaaa

SEQ ID NO: 139 - DNA, 842 bp, Zea mays
atgagcaacgttctaattaatttcactagacgggcaatgttgacagcaagaaccacagatgagtcttatggagagctctaacaaaaaaattgcaagtcaagttggaagtttatctctgatgggatttgcatagtatgtctgctggttcgcattgttacattgtgtctgccaaaagattttatgcagataacaacccggagcttatgtctaacatgtgaatgcgtttgagacaatgtaccttgacagtgtttagtagaactttggcttcgttattgttgttgaagtggtcacgaacaggctggaaaaattaaattagtgagtcaaacctacaagtgtgaaccagcactgaaaattgtgtaataatagcttcttcctcgacaaaagaaggacaggcaataaacaagatggacaagttcgccagaaactacgctagcaagaaacaagagcgatgatgcagcaataacgacagcccatcaattcattttgtcaggacagcagctatttcattttcaaagaaatcacagtgcaagacatgagattggtaaagatcaagaatatacaagtttctgaccagagaaagactacaataatatcatagaaaaaaagtagggtcgagtgaagaaaattgcacctgcaaaatttcatttattgcttttgccagtgcaggtttgacatcagcaggatgcaaagcaccagtctcataatcagaaattagttcatccatgcttgtaaatgtcctgtttgagtgcaaatgctttagaagtataatccgagataataaatcatgtcacgttggaaattaaaataacctatttgctgcattaataaattgcatgaccaca

SEQ ID NO: 140 - DNA, 847 bp, Zea mays
agagcaacatttgagataaatgcatatttcatctgtggaggagaacaagtcaagtacacaaaatcttgctcaggtaacaattgtgctcagtaagacatataccttgcacttgtccaattgcgtcggaggcaagcatcggggtgcagtgaagaaaggtgtttttggatcgtaaaaatcaaacttggaaggctgaagagagaaacatattaggtaaatttgtgtttaaattctagccaacaactattaaatgataagctaattgaagaaaacaggatggaactaagatggtctaacacattctatgcattgaattccaggtaatatatatgcagtacagaatacatgacagagtacctgctcagtgagggccaagtttgcatcaaagaatgatttgattgttccaacatcctcccaatagcccgtaaaaatgcatgcctaacacaatacgtaaaatgtattgttagtatgtatgatgcatggaagcgaaaatacataaatcgtgcattggtaaataaaaactagtggaaactggaaacaaaaacaactttttgacatgaagaatttacagtttacagaacacatactccagacagatcagacttacctgcacactatgatctagtacagctcttgggaggatttcagatccaaagtcatgtaattgagtatattttgacctaagaattgacactgttagaaggtaaactaggagttggatagaaataagtcacaggaaagtgattacttgagaaggtctaaaagtgcatctttcttgaagacataaatgcccattgatgcaaggtatggatatttctgtgcatcatctatagcatagctcaagaagttg

SEQ ID NO: 141 - DNA, 528 bp, Zea mays
aagtttcaccagacgctgcctgaatcatgttctagttttctgttcttgcatacaaaagattgtagtgttttcgtacatatttatccataataccaaatcagatacatatacatgcttaacgcttccttctaatatccaagtatttgctgccccctctttgattttgtatgatttattatggactattggtataatgcagctggagttccatcagagaatattctttatcttggcggacctaatattgcttctgaaatttacaacaaagaatatgcaaatgcacgtatttgtggagctgacaaatggagaaagccccttgcaaagtttttgaggcagcctcattttattgtgtgggataacagtgatctcatcactcatgaagtcatgggtggcttaaaaaatgtctatgctattggtgctggtaatttctatttgtctttttcactgtttcctgttttcttgattacaatggagagctacatatatcattatattaagaataaaaagatgggctagaaacccttgcac

SEQ ID NO: 142 - DNA, 564 bp, Zea mays
agacgtggtgacggccacgctgacgacggtggcgcgccgcatgaccttggactcggacggcggcggcgcgcggatggtgtcctggatctcgatgaggatgagggagtaggagtaggcgaaggcgatgtcgccgaacgcctgcaggctgcgccacactcttgtcgaccggggtgaccgcgccgacgctgatccccgtcaggctgccctgcacgcccttgttggacaccacctgcgcgatgcccaggcccaggccgatggtggagtaggtgaaggacatgacggcggcgaggatggagagccacgatatctggtcgaagtccgggatctgcgagaagaaaatctgcacgacgccgaagatgatcatgtagggcgtgctggagatgttgcaggggtccccgtgcccctccacgtggaagcagttcgccctctggatcgccctgcatgcagcacacgtacgtcgcgttaattaccaaattatatatgctgagctcagcctcggacgaagttctctcgtggtctttttctatataatatatactcacagcatgctaatagaggcggaat

SEQ ID NO: 143 - DNA, 709 bp, Zea mays
cagaaccatagcacacatgctcacaaggcatcgtgctagcatgaacttcacttgtgctgagatgagggacagtgaacagagttcagaggcgaaaagtgcacctgaggaactggttcaacaggtttaagccattgtcacttgtctgtattctccttttaaggaacacaaaagggacttttcaatcattaacaaaatattctggtgcaaactataaaaaatggcaggtgctgagtgccggatggagagagggcctaaatttggcatgtgaaaatgcactcaaccgatatgatgcaacagcttacaacaccatcctcaggaatgcaagacctcaaggcatcaacaagaatggccctccagaacacaagttgcacggattcacctacctccgagtatctgatgaactgttccaggaacagaactacaccactttcaaaacttttgtcaggagaatgcatgctaacctggtgagtaacacccttgaaaatctagacattcataattggacacatttatgtttgagctacacgctgacagaatatatataaaaaattcaggattataatccaaatgtcgacccagttgcaccattggaaagatcaaaggcagagataccaattgaagaaatcctagaagtagcacagccaaaattggagccatttcccttcgacaaggacaccgacctaccagtttaaacactccatgatgcaac

SEQ ID NO: 144 - DNA, 527 bp, Zea mays
gtcaagggtttctagcccatctttttattcttaatataatgatatatgtagctctccagtgtaatcaagaaaacaggaaacagtgaaaaagacaaatagaaattaccagcaccaatagcatagacattttttaagccacccatgacttcatgagtgatgagatcactgttatcccacacaataaaatgaggctgcctcaaaaactttgcaaggggctttctccatttgtcagctccacaaatacgtgcatttgcatattctttgttgtaaatttcagaagcaatattaggtccgccaagataaagaatattctctgatggaactccagctgcattataccaatagtccataataaatcatacaaaatcaaagaggggacaacaaatacttggatattaggaggaagcattgagcatatatatgtatctgatttgatattatggataaatatgtacgaaaacactacaatcttttgtatgcaagaacagcaaactagaatatgattcaggcagcgtctggtgaaactt

SEQ ID NO: 145 - DNA, 1311 bp, Zea mays
gcttgaagagtttgggagctggccgttatgaaaaggtggtttgattatgccattcgctcccttagaatttttttaatatggttagaagtacactttttattggcttgtacattctctctaacaatgcctgtcaatatttctcttctactactattaatatctagaacaataggggctgcccatactgtagtgctttaaaaagaagcaatttcagagttattttagaattttgaaaaccatttcattattatgaaagcaagttattttagaacattcaaacacaatcaatgatttttttctgacatgaaaagttcattcatgttttgatgagtttttttaatgcaaattaactttggatcaacatagcaacttagcaagcaatttattctacaacttttttgttctcttttatctgaactttgaagtagtctgtgatgtgggaatagaagagctcaccaagaacatgttggttaacctttattatgtagtttcctcagtttattatttcttgatcccagtccctcgaagagctcacaaagatggcccataatttctatgatgagactgcactcccaaagctggtaagccttgttttagctattttgttaattttctttaaaattttgagtcacttatagcaacattcgctactttagctatcttgtcctgatttgttctttaattaccctataaaaactcttgttatggtacatgatgttgagttagtttacttaatagtatcagagtagtcattcgtcaagcatatatgatcttgggatgttttattcccatagtacttaattcatttttttttcttggaatacatttcgtacaggtggctgatttcgcgtcccttgagctttctcctgtggatggaagaaccatgaccgatttcatgcatacaaggggacttaatatgtcctctttaggacgtgtggtgggtgtaaattttatgcctaaatgcttttcctactatgtttggacaaagttgcataataatctgatattgtttctttatattaatcaggtagagctagcagagaagctcccacacatccagtctatatgcattcatgaaatggttattagatcctttaagcacatcgtccgagctgttattgctgctgttggtgacatgcaaaatatttctgcagctatagctgaaactctaaacatattacttggatctcccagacttgaaaatggtgctgacacagatgcccatattacaatatttgcgtttaaatggtaagagcttcctttcaaaaagattctgctgaaactaaagataattgcacacttcggaaatta

SEQ ID NO: 146 - DNA, 499 bp, Zea mays
agagaaagacgtgctgagcaatgtattatatgttccgttgctattctatcctgttatgcataatcctgagctgaactcacatttcttctctttctcatgcttttataggaagtccctctcggcccaacactagattgatatacagagaatttccactgtggcctcccgaaccaagccctctcccactgctaccaccttccttcgttgtacccggattatttcgtgtaaagatcacatgtgatcctaagaattaaaacgtgagtcgttttagcatatattgtgaagcacgtgctggcaagtttccgttcttggcattgggtcaaattggggtgccctgcttccgattccctgctgcaccgtgcctatgtagcatgtaaagttgtatatgctgcgaatcgtagtacagctatatatttgtgtgtcctaaatcttgagtgtctttttactgccttctgtaaatgctccccaactgatgtaaatacaaaattccatgttcctc

SEQ ID NO: 147 - DNA, 741 bp, Zea mays
caaacagctacaaacattgcaacctgacctacctttgagaccatatataaagatcaccaaccagagagaggcaactgactcacaacacaatttgcagctacaaaaccattgtatatgtacggaggtgctattccttgacgtcttcaaagagttcatcttcgtcttcgtcctcgtcgttttctttggcttcatcagaatcgtagctgtcgtactgtaggaggctgccaaagtcgctggattgtgccttgatgagcctctcctggatcctctccttgatggctgtcccctgaggaagttttggaaacaagaatacataaatgagcagtggactcctaatcgaaagcagtggactctctgcgaagggtggtcagagggtaactgaccattgagtggcacccttcctcaaacttctctaagaaaccagccacccagcggtctgcattttccacccactcttcctggagttttgcaaccgtgctccactgtaaacaaacatgagtaattcagaaggctaatggacaaaagggcaccaaccctgtctaaataaagtgagggcttgtttgggtaatcttggattgaggtggtataaggtgtattgaagtgtaatatgaactaatttcttttcaatccctaaaatacctcaatccacttcaatccctctttatccaaacaaagcctgatggggttaaataaacacgatggtagatgcaaataccttctcccctactttttcttggtgcg

SEQ ID NO: 148 - DNA, 853 bp, Zea mays
cctggctttgtttctttagttggagtgcccaaaattctgcattggtagaagagaatctcaaacgtgcaacatgcaacaaactaattgaagtttgaaccaacacttgtaaataagacctgaaaatcttaaacagctcatcgatctcagagtcgccaggaaaaagcgccttctggttcaccatttcagcgaaaatgcaaccaactgaccacacatcaacaggggtggaataatgccttgcaccgagaaggatttcaggcgctctataccaaagcgtcaccacctaataacaagttcagttccaattaaatgatcaaaatctcaaaaggaaaggagcacatgcggagcatcatgtaacagttctatcatatgtaaatgccagccccaatggtgtttgtgccaagtcaaagacaacactaaatttgaaatcacccaagaacaagaacaatgtgacctctagaaaagaactgcactattgccaagcagaagagtgatttttctagaactttccttcttaaaacagcctttgcagtttcatacaaaatcctactaagatatgtatatgcataagcatgtgttctgtttttagcttcgacacttgctctgtcgtgtgcacaggacgaagtaagcaatcctaaggcatactacagaaaagcacacatgaatgacattaccggcagttactaaatatccttcccacaaatacgaaaggcgcgcaaatgagttggacagtggtactggtacgccatgaaaagaaaacacatgcatgcaggctaacgaactggtaattatgatgtgttatgatcactacaactgcaatatcgggtctatcggccagccccatgagtgatttctt

SEQ ID NO: 149 - DNA, 1226 bp, Zea mays
tcctcctaaagtgcctaccactgccgatgtgccaagtcgtgctcctgccttggtgtcctgcaccggcttggtgtctcctggacgctcaggagattctgtttcatccgatgagacgatgtcgacttgcgactccatgaaaagcccggactttgagtacgtagacaatcaggacacctcgatgctggcttcgttgcagcgacggacaagtgaacatctgcgaatatcagaggatagagatgttgaaggtctgctgaaattcatatacgatttgaattgtttaataagtgtgttttgttatactttttgttgatccagttgctttcttttgcagaaaataagcggaagaaaaatgccgtggccccaatggaaattgaccgcatctgtgatgttgacagtgaatatgaggatccacagctgtgcgctactctggcttctgacatttacatgcacttgcgagaggctgaggtgacacattcttttctaatttctggtgaccaaatggtttcatttgagcactgaacataaggaactttgggttgactgccaacgttgatgcaataagctaggctgcaatatgcttacattaagtctgttagatcgtacttatgtaattgcagttcaacagtgtgggtgtaatttcttattcttatttatgtgaagttttttttgttggtgtattaatgaaacttgatttgatcgaaggactgtctatgttttgttcaatggaactttggcctacacttgaaatttttctttctttcttgatttttactaatagtgctttactttctggcagacgaagaaaagaccgtcaactgatttcatggaaacgattcaaaaagatgtcaacccaagcatgagagcaattctgatagactggctcgtggaagtaagtttttttgttgtctcaaagtaagaaaagcctaaagaacaatcttgtcaacttgtattcattattttctcctcatgcaggttgctgaagaatatcgtcttgttcctgatactttgtacctgacagtcaactacattgaccgttatctttctggcaacgaaatcagccgccaacggctgcaattacttggtgttgcatgcatgcttatagctgcgtaagattctgcttctctttccatttattatccttagttgtcattacgatgttagcgtactgatttggcatgttgggaacttcaaattcagaaaatacgaggagatatgtcccccccccc

SEQ ID NO: 150 - DNA, 849 bp, Zea mays
  misc_feature (839)..(839): n is a, c, g, or t
agcattttgatagactggctcgtggaagtaagtttttttttgtctcaaagtaagaaaagcctaaagaacaatcttgtcaacttgtattcattattttcccctcatgcaggttgctgaagaatatcgtcttgttcctgatactttgtacctgacagtcaactacattgaccgttatctttctggcaacgaaatcagccgccaacggctgcaattacttggtgttgcatgcatgcttatagctgcgtaagattctgcttctctttccatttattatccttagttgtcattacgatgttagcgtactgatttggcatgttgggaacttcaaattcagaaaatacgaggagatatgtgcaccacaagtagaagaattctgctacataacagacaatacatatttcagagatgaggtttgtgacatgtttacttcctatcgttctttaaaaaaatacagcagaccatatcgaatagtcccttgtttgtcactgtcactaaataacttgtacgttaacaggttctagatatggaagcttctgtactgaattacttgaagtttgaaatgacagcacctacagcaaagtgctttttgaggtgattatccccgttttttattttagaaataaatataatgattattctaatctaacttgccactaactcttatcttttctttttttgcttacaataggagatttgctcgtgctgcacaagcgtgtgatgaggtactgctatatagtcagcttctggttactggaaggaattcctcaagttacagatatgagaacaattcgctgacaatctctctttgtacaggatcctgctttcatctgagtcccgcnccaaaaaaaa

SEQ ID NO: 151 - DNA, 535 bp, Zea mays
gttgccagggcacttgtcaccactactgatgccattggctaccatgaacccatggatgcagtactgcatgaagcaacagggggttgccaacttgttagcgtggccgaccctgatgatgcagcaactgttggcctcaccgcttcagccgtgccagatgccaatgatgatgccgggtatgatgccaccgatgccgatgatgccgatgccgagtatgatgtcatcaatgatggtgccgactatgatgtcaccaatgacgatggctagtatgatgccaccgatgatgatgccaagcatgatttcaccaatgatgatgccgagtatgatgtcttcgatgataatgccttcgatgatgatgccgaccatgatgtcaccaatgatgatgacgagtatgataccaccgatgatgatgccgagcatggtgtcaccaatgatgatgccaaacatgatgacagtgccacaatgttactctgattccatctcgcacattatacaacaacaacaattaccattcatggttgagcccacatgttgagcc

SEQ ID NO: 152 - DNA, 471 bp, Zea mays
tagctctttgtgcaagcgccactagtgcgacgcatattccagggcacttgccaccagtcatgccattgggtaccatgaacccatgcatgcagtactgcatgatgcaacaggggcttgccagcttgatggcgtgtccgtccctgatgctgcagcaactgttggccttaccgcttcagacgatgccagtgatgatgccacagatgatgacgcctaacatgatgtcaccattgatgatgccgagcatgatgtcaccaatggtcttgccgagcatgatgtcgcaaatgatgatgccacaatgtcactgcgacgccgtctcgcagattatgctgcaacagcagttaccattcatgttcaacccaatggccatgacgattccacccatgttcttacagcaaccctttgttggtgctgcattctagatagaaatatttgtgttgtaccgaataatgagttgacatgccatcgcgtgtg

SEQ ID NO: 153 - DNA, 909 bp, Zea mays
  misc_feature (593)..(593): n is a, c, g, or t
  misc_feature (595)..(597): n is a, c, g, or t
  misc_feature (599)..(600): n is a, c, g, or t
attatacagcactgaggctgcaaaggacatgggtgctaagaagtacaagtaccccgatgtatacgacccctacgggcctatgccgccgccttcggagaaagtcgtggaactagctgatcgcatcgctgctctccctcccgaggagatcaaacagattgctccagcccttctcctcagactgaaccaggagccgccacaggcggtatctggccagggtttcggtttcggtgcccaggtcggctctggggcaggttctggaaaggctgaggagaagaaagccgagaagacagtcttcgatgtcaggttggagaagttcgatgctgctgcgaagatcaagatcatcaaggagatcaggacgtttacggatctggggctgaaggaggccaaggagctggtggagaaggccccggtcgttctgaagcaatcgctcacaaaggaggaagcggaagcaatcatagcgaagataaaggcagctggcggtgttgctgtgatggagtgaatgatagatgatcatctagacatcacgccttcttttttgtttcatatttttgttgccatgttcaggtatttgagatgccacccattgcaggacncnnncnncccccaacaccaatcctccctcccctcctcctccataccatactcctaccttcttttctcacttattttcctccccttcacactttcccaccctcaccaaccatctctctccccctctcccctctctctccccttcctcccccctcctccccctctctcactcccttccccccccaacctcctcccccctccaccctactcccctcaccttcccccctctaccccactcccatcctctcccctctctcctcccacctcctttcactacctcccttcctttaactcattcccttacccttccccctctct

SEQ ID NO: 154 - DNA, 984 bp, Zea mays
gcggtggggcctggccgacttcgccgccgccgtcaaggaagccggcgtgcacggcctcatagttcccgacctcccgtatgggaactcgtgtgctctcactctcaggaccgaagccatcaagaacagcctcgagctggtatgtgacatcaattatcaaggagaagcacgtggcgtcgtctcctagtctagttcttctgcgcaatataaaattgagaaagcagcgtctgtctcacgacatgaacaatggctgaacgcatgcaggtgctgctcacaacaccatctacgccagcggacaggatgggggagataacacgagcttcacgaggattcgtctatctcgtaagtgacacaaaactttccgtccaggagttttgctagcgactgaacttgccggccgatgacatgcatgcatgctcatgtatcctacttgaccatcacaggcgaccgtcaatggagttacaggtccacgcgcaaacgtgaacacacgtgtccagtctctcattcaggaggttaaacaggtaataatacgtcttggcgtcttgccaaaggaaaaggagagaaaagagagggagagagaaaaagatgccatttttattcgtttttgttgttaccaatcacaatcactgagctggctggctggcttgtgtttttttgtttgctgcaggtcactgacatacccgtggctgtcgggtttggcatatcgaaacctgagcatgtaaagcaggtaggcaaaactttttttttaaaaaaaatgcctcaaaaacttattcacatattttttttatagtaacaaattctaacagtatatatattgcacctggacagattgcagagtggggtgcagatggtgtgatcattggtagcgcaatggtgagacagttaggcgaagcagcctctcccaaggaaggattgaagaggctagagaaatacgccaggagcatgaagaacgcgctaccatgccagtgaactagtcgtatgacgcga

SEQ ID NO: 155 - DNA, 1667 bp, Zea mays
ttatttttaagtggctcgggtaagtagctcaatgatgccgagaatttaattggtattgaacaaaggatgtctctgtatttgtggaaagcaaatgcgagctgtattgctcatccctcttttgcattagatgcctgtgtggacagtgtggtggactgtactgcataggtagcattctagtttttgcttaattgaatggtagttattttggtttacaaggtatagcttaagaaagtctggttcactatttttcattttggctggtatatttacacagcacactattcagctagtcccttctctaggacaaaaaaatcatgtcttttttgcgtgccaatatcatatattcaatctgataaatatccagtaaagcagtaagctcagctggagtttccatacatgtcataaatatttaaccatactcggccacaaaataaaccctatataacatattattaaatttgaatatttcttgcaaaaagttctcatcttttgtggggtccttcgagttatattttttgattgccaataagcctcactgttggttctcttattatgcaggccccatggtagtgattgtggcatagtgaatgtgaacatacctactaatggtgctgaaattggtggagcatttggtggagaaaaagcaactggtggtggacgagaagcagggagtgattcctggaagcagtacatgaggagggcgacttggtaagagtatacacatttttgctgtgattgtatttgaaatggtactatatataatcattattagagcagtgcatagtaagggtagttgcataatttgatatataaatatactggcatgccaattgccagtttgccacatgtcacactgagtttaagattgaagagtaggtgatgattatttagttagatgtccttgttgtactcaactatcttcagccaggctagtttcttgcttatagggcgctggagacccagccctagtctagggtttggttgtttggctccagcctttttactgcacactttgcaactgcaagtctgcaacacatctttactggatattctttttagtatgtactacctccgttttcgaatatttatcgttcgctagttcatttttaaactaaaatgcgacaaatagaaaagaacggaaggagtagtaaaataacgaatatacatgagaattacatgcattacaagtaccctttgttctgaacttctgattgtcccactcatctgtgggttggtatttgtaacgattcgttactgcaaaggttgcaagttttctgtcgaaaggacaattttcagttcgattttttttactaacacccattctacacatttgcagtacaatcaactatgggagcgagctacctctagcccagggaatcaattttggttaatcctgcagaaatgttgcgcgtggatctcagtgttttctgcagacgtggatgccgtacggaaagaactgatgcaaccgcatttgagatctcagcagacttgagcagcatttattggcgtcagttgtgaaacttaaactgcaggagcatcttgtacataaataaaataagatgtttgttgctcgtgggccgtggcacgttttggtaccggtgtccagtctactaataaaatctaatgcaaaacggtcataactacattctcatgcagtagatttccgc

SEQ ID NO: 156 - DNA, 801 bp, Zea mays
agcaaattggtcacatttggaaggttctggcggtagaaagcctcacgaagagcacggactttatcggttctcgtaatcaacagatggaacagtgcaatgacagccccttcgaattcagcgccacgaccactgttgatggttgtggggctaaatgccttccagatgatattctcactacatgaaagcagtcttattataagactaagtggaacagaacattacatcaatctaatatcaacatcaataaaaggattaaatccaacatgcttaccagatattggtagcaatgaacagagaaataccagatcccaaaccataacctttctggagaagttcatccaaacagatgacaatgatgccagcaaagaaaagctgaagtataatgagaatagcattccctgttccaagttggcttacactaccatacattccagacaggacatatgccacagcttccccaatagcgatcaagataccaagcaacttttgtgcaccattcctgagtaaagaaatgcaatgtgcatcacaatacaaatatattaaatacagatcagaaggtttataatctactatggcagacttgatagagaaatgctacgattagaattgtgataattgaagatcacaatatttttagaaagacaacacttacagcagagcacgatcctctctcacactgttgtcaacttcaatgatcttcgatccgacaagaagttgcattaccataccagaggtcacaattggagtaatacccaactccatcacagtgccacggtttgatgcaaggataacacgcatcca

SEQ ID NO: 157 - DNA, 565 bp, Zea mays
cgttcctgtgtacgttatacaacagctcggcgcatgtgtctgtatgcattatgcaagcacatgcatgggcatctaccgatgaccacctacaatgctgcggtggtggcggcgcccttggcctccgccgccttcctctccttggcggcgtcgacaaacccgacgtacaggtccgagtgccccgtgtcacaccgcggcagcgctggcctcgcgccaccgtcggccatagccctgacgaaggacacgaaccgcccccagttgtcgccgtcgaagagcgtcttgttcatgcgcagatacgtgaacgcggccaggcctgcgccgcgcgccgtcgacaccacctgcgagaacgccgcatcgtcgtaccgctccagcgcgttctcgccggcgagctgcacgccggcggcgctggtcgcagccttgacctgctgcaccagcagctcgggggagcagctggcgtgctgcggctgctgctcgtccttcatctccatgcacgtgaagttgagcacagcgccgcgcttggccagcatgcgcgcgatcggcgcgtacccgtcgtggccccgcgtgttga

SEQ ID NO: 158 - DNA, 332 bp, Zea mays
cagaccattcctccaccttccacttccgtcctcggcaacaagtggtccgccatcgccacgcacctccccggccgcaccgacaacgagatcaagaacttctggaacacgcacctcaagaagcgcctcatccagatgggcttcgaccccatgacgcaccgcccgcgcaccgacttgttcgccgcgctgccgcagctcatcgcgctcgcagccctccgcgagcagctggccgccctctgctcgccgcaactgactgctgctacgactgccccgtccgcggatgacggcgaccgccagtcgtcgtacctaccgtgcacgttccccgtcagtagtga

SEQ ID NO: 159 - DNA, 936 bp, Zea mays
tcatcacagacactagcaatgttcaaaaccccaactgatccaagctaaaaataaaataaaataaaataaaaataaaggatagcatcccaccaccacgcatgccaacattttatttgatgccccggggcgaaatctccacgaaagctaacttaattaacccaaacaaaccgtctcagcgtagaggcgcagagacggacgctaagactcgatctacctaatgaaccgaaaccgaggacgtcgacgacgaggggcggggcggcgggggacagtgacgtggtggaacggcggggcgtgcggccatctagttggccttggcgatgaggtcctgggcggtggcgaccgtgggcagcgccgggatggcgcccttcttggtggtgcagatggcgccgcaggcgttggagaacttgagagcctcgcggagcttctcctcgttctgagaggggaattaaaaaaaagaagaagcattagcacgtgattgaccatcatcagcaggcagcagcagcagaagagaatgaagcgttccatacgtggaagatggagtcgtccttggcgacgttgacgaggagggagccgacgaaggcgtcgccggcgccggtggtgtcgacggtgtcgaccttgaagccgggcacgctgcccttgaaatccttggtgaagaacctggatacaccaccaacaccacccgcccaatccccttaactataattctccccaatcaccttcatatttccacatctttcccctcaaccataaatccgcccccccgataacacttcaactttcacccaaccccccccattcacactaacaccacactccatcacaactttatacccaacacccccacctcaaaccaacccctcgaactcattcccacaccacacaccccccctaaaactaaccacacataaaaaatatccccccccctactccccaccc

SEQ ID NO: 160 - DNA, 607 bp, Zea mays
ataatcgccaaatgtgctacccatatcccagggcacttgtcaccactactgatgccattggctaccatgaacccatggatgcagtactgcatgaagcaacagggggttgccaacttgctagcgtggccgaccctgatgctgcagcaactgttggcctcaccgcttcagccgtgccagatgccaatgatgatgccaggtatgatgccaccgatgacaatgatgccgatgccgaatatgatgccatcgatgatggtgccgactatgatgtcaccaataacgatagctagtatgatgccaccgatgatgatgccaaacatggtttcaccaatgatgatgccgagtatgatgtcttcgatgataatgccttcgatgatgacgccgagtatgatgccgaccatgatgtcaccaatgatgatgacgagtatgataccaccgatgatgatgccgagcatggtgtcaccaatgatgatgccaaacatgatgacagtgccacaatgttactctgattccatctcgcacattatacaacaacaacaattaccattcatgttcagccccacagccatggcgatctcacccatgttcttacagcagccctttgttgggg

SEQ ID NO: 161 - DNA, 1027 bp, Zea mays
aaaccttgcctgcaaagatttgtatgatatgcgacgttaataggttgaaggcacttgcttcaccaatgtaaggaattttgcacaaaataataatatcacgtggggagaatccaggtaatttacaagatgaaaaaggtactaattttcgaagcatttgttgaatgtttgcaacatgaaggtggcagaaagcaaatgcaacataaagcgtgtaaaattcacaaacctgcgagccatgttggtcgcagaccactagtcttggaactggaaatcgaccctttattatcatctgtgcctcctcatgtggtgcttgtaatagttgtgcaaattgctaaaaaagtgaacagaaagcatcagaatgtgagaacacttaaattgtgtgcacatcagccctgaaaaagaatgaaaaacaatacatgcaaccacaatgtgttctcataaatgacagcacgtaaggccattagtgtgaaaccagcacgacagtggcttccaacttctagcaaaaatgcactccataaaaaagaacatagctctcagcatcaaaacatgggctcaggctagtaataaaggaacatgggctcaggccagtaataaagagaaggaattgttgtggattattctagttacctcatgctcaggttggttctgataacccatgtttctccactgagcaattgtcattccatgaaaaatgacaacactaaagtacgcatcaagtagcagtatacgatctgctgctattgatgccacatctagaaataccggagatggaggtgaatcaaaagaaaatgatatcaaggaaggctggatcatggcaaccgagttagtgatactctcacgattgagtaacatcctgaaataagctgtctcatctggactgttattgaaaacctgtaacataaaatctgatagtattagtggggcaaaaacatttttcagtacatagggtgaaaatgcatgccagctcacctgaacaaattgtgaacgccgaagattaaacataatctgacggaacaatgagaaattgaag

SEQ ID NO: 162 - DNA, 832 bp, Zea mays
acaccgcaggtgctatatagtcgacctgcagagccgtgaaggcccgagaagttacaccgtaccaaactgtcctgtggtcactaacaataatcgatagaatggtaaaacatggccgagatggcctgtgtggatctgtgttgaaaacaatccaaatttcactctgacagaatggcggggaaggccagggagcacgtcagcaagttccattccatgatagatatcggagacaagattaccggcttttacagttggagttgacttggcttttaaagcagtccaaaaactctctcgatctgttatagagtgacagtggtccagatgatagagagaagaagcacacggtgcatgcatgatacgacctcccggcctgaccagattgccaacctaccgagtttgacctgaatgcccccggccggtaccatccaaacaccccactgtagacgacgactgtagcgagctagcgacacagacagaggtgcacagtcgtcgtcgtcgcactcgcacgtacggcggaacagaaaccacgacgcgcgctagctgctgcatgcgatgccagggagaaagagagaagaaaaactaggccttggattctagcaatctatagctaccggcacgatctgcatgctagtcgccacgccagggcaagataaccgcgtagtaaaacccgcgttgtacgggcggcggccgcgacaggacaagcggcgcccgcgcgggcaagaggccccgccaggcccacccaactagcctgcttgccgggggtgcccagggccctaagcttaggttaaaccctaacgtaccaggtacaagcttctttttttctttcttacaattg

SEQ ID NO: 163 - DNA, 627 bp, Zea mays
attttatgagctattttatgagctagaattggtctttacgatttgcttggatcttgtaagtagctttctccttctcaaaaaggaaaaaacatttccccttttcccattgaaatggattccttctttccttttccttttgcattgacttttcttttcaaaatcatatattcggtttcgttcatagtttttctatacactatactaatacaaagagacaattccttatttgacactagtaaagttcttggttcatttcttgacctttaaaatataaatcttctatatttaacaatgtatgtaaatttagttcactacattatattaacttttatgtgaaaaatatgagtttactcctatttaatattatcccaataattatcagtgacaaatttggtcatttttatggctcccacctatccactttaatctatcgtggtcttttgtgatcattgttgtctggtgataatccttagtatattgactttgtgaagggcacatctgagtgtccaattttttatgtctaatcttggttctcttcgttattttcttgggatcgaggtctcctccacgcctgaaggcttctatctatctcaaaaagtacattcagaggcttcatgattaatgctc

SEQ ID NO: 164 - DNA, 747 bp, Zea mays
gcagcgtccttatgcgcatgaaaacagcagtactcaaaaggagaccaatcagcaaaaagtgccagcagaccacacacacctgctcttcactaatcacccaaaagaaccctttgcctaaaaattacagcaccaggaatctgatcacaacaaccagcaattccaaccagaaacataacaccaattggtattagcattgaacatttaacaacaactcaaactgtgagagatacaacagccccccaggcattttgctaagaataccttgtcatgcaggttgaacccacaccactcatacacagtggcaatgtggaccataccagaacggacacgacctcgggccggaccttagacttgcgctttggcatgggacagacacgaaattttgtttaaaatccagcttgaaattcactcctacgagaagttaaaccgaagacttgaggagttactagagccacctaaccaactcaggtagagacccgttcacagcaaacatttactacactgtaagatgacttatagactgaaaactttacagggaaagtggagaacccatccatgcattaaaaaaaggcagacacagtgccaaggctcccacatgaatgagatctgggaaagggataaaccaaggcaaacctctccccgcaaatgcggagaggttgcttcgaacccacgacctagtgactcgacgagacagctctcacctggtgacccatccatgcattcaactaacaaaatctacatcaaaaa

SEQ ID NO: 165 - DNA, 467 bp, Zea mays
agacatgagtgtaagtcatacataacaaatattgcggactaaaaatgctggtgttactccctccatcccggaatgatatattcatgtaaaagtcaaactttacgaattttggccaacaattattcaaattatataaaattttaaggcataaaaaaggctttgatggattcatatttgaattgcctctgatctgatatcggaactctttagcgaacgaaaacatacagtaagaggaattaatggtcaaaatctaatttgtttgacttttcctgatatgattaattgattatcattccaagacagagggagaatattactccctccgtcccaaattaaaattcgttttagatatttattagattcatacgatgattaatgtatatgtttggtatatatgtctagattcatcatctatttgaatatagacataaaattcaagtgctaaagcgaacactaatatgggacgg

SEQ ID NO: 166 - DNA, 770 bp, Zea mays
tttgctgcctgcagtagtatgaattcatcaagggcaagggtgcagatgtcattccagcatttgtccaaagacaaacctttctttctttaaccatcaatttctagaaattcgtagtttattatcgtatgatttaagttcctagattaaccatgagaaatactttcatagcatataatttgcatgttgttaagctgtatgaacttgtaggaattgttggtcaaagatgtaaatgtttgaataaggacaatgccaaaatgacaattaaattgaaacaagagtatattataagcttaaacctatgtggccatcatggttcttaaagcggtaaggcgacgtcttatctatctaagaaccagcaagactaacatggagaggaagaaaaagaaaaaagaaaaagaaaaaaaggggtagcaggcccagcccaccatctagcccacatatcctccctgttgccctcctcctgccgatggggccgcccctgccctcgaagcagccgtcagcaccctagatttggcgttgccgacctcgattcgggctgccgccgccccgattcgagccaccgttgagctgatttggtcgtcgacgccccgattcaacgtgccccatctcctccctcttgctggttcttcgctgggcgatggggacacctagccactttggggcgcctggacgcctaggcgacacctttaaaaccatggtggccatagaagatccctcttagtgttgtatgcaaggaactaaggaaggtcctcatcaagttgcaaaagctg

SEQ ID NO: 167 - DNA, 780 bp, Zea mays
  misc_feature (718)..(718): n is a, c, g, or t
accaaattaataaagctttgggacatactccatcctgaaatgataagcatatttgatcagggaaagtcatacaatgtagctttggacccttaatttcttttaaaatatgttgtcatttgctaaagagttaataccattttagaagcactttgaatacaaacttattggtgcaagttgtatataatctaacaaattgttggtcaaagtttgtaaaatttacttcttgttcaaaatacgcttatcattctgggatggagggggcagttccttaaatcattaatgaaaaagtttgttacgattccattttgctttctgttctctgggtatcactatatgaaactctgtgcaggtctggaactgttgcatctggcacaaccaaagcagatttgctttctacacaaaatggtcttgttatgcgacccttaaataggagtgatcaagacaatggtttccatcctactaacaaaagggaacgtcaagctgcattagataaagaaacgcccaacccgagaaccattaacaagtaagatgtgcttttttacctgttctgctctatgctcctctattttatcatttaccacattaaactaagaaagttatcttctgctgcacactgagtcctaattctttcatcataactgtgattagtatttcaccttcaccgccaactcagttcacacacttgaatgaacaaaatcaggccttgacacattgattnttcaggcctaatgaagacgacagtggatgtaacattgcatcattaccgaaggcgaatggatc

SEQ ID NO: 168 - DNA, 863 bp, Zea mays
cactcttgcatgcctgcaggttccgttcagtttgtgacgtgttcatcccacttatcttaaaacaacagaacgttaaccttaaagcatggcctaacgtggttggttgttcggttgctttaagattagggcgatggactcgtgtcacgaattgaacggagactgcgtgtcgcttctatgcagctggttgttggtatggtatcccccaataagcccctaatcattccccgcacggatcacaccacatatgtttgggcacttcctgttcctggggtcctcgcccacgtaggctaacaacgcaagcattgtaccgaaaaccccaggcatcagatgctccaatctttgctgcccatacataggccgcctctagagagcaaaaaagagaagtgcaaacaaagatcctcaaaaggacaggcagccaaatgccccaccacagcgtagcccctcctcactgactcacctgcaaaaaccacttgcaaaccacacaaaccgaaaccgccagctcccctgcctccatttttagcaacttttcccttcaatctcccgtcgcagtcacccttcttgcacccccgcgcagcttccgacacctccgaccttctctggcggcgccccgccgttggacgctcatggagaagagcccgggcgccgcgccgacatcatcgcccgaggaggaggtggcggcggatggccgcgggcacgttgaggacgcgacggggcagaaggagcaggcgacgcccgtggtgctcaagaaggggccgtggacggcagcggaggatgccatgctcatggaccacgtccggcaccacggcgaggggaactggaacgcagtgcagagggtgacccgcctgctgcgctgcggcaagagc

SEQ ID NO: 169 - DNA, 1295 bp, Zea mays
gccacagccgcaacctgctgcactggacgctgcgccaggaagccacgtgcagccgcttacagtcatgttgccgccgctgatcggcagtcagactccacctttgccgcgagtagatcacggagctagaggatagcagatcgggcctgctccaaatatacacgtggtaggcgggcttgaaagcggtcctggtagtcgaccaccgagcccgttcggcggcatgcagcaagctcgtcgagcgggtttgaacgcacgggggtccgaagcgcaggttcaggagttcggagaagcggcgccatgatggagtgccctcatcttgctgtatttggatgaaccacagctaggcgacatcgtcgaggttgtaggaggccattcacacgcgttcctcgtcgatgatgcgttgttgatggaagtaggactcacatcgattaaggaacaccaatgaatcagttttgccatcatactttgggaagtccaacttctggaaccgtgggggtcaatcctggtgatgatcgccagacgccggtgtgttgtcccttcccggcttcccgcccagggcagaggactcgattcgatggtcctactggagttcggtgaccgacaacttgagggattctacagttgctacaagggattgcatgatggtgactaggtcggatgtgttgggttccgccatagcagccatagcagaggttgatgaggttgcgtcgaatggtggtgaagagatggatttaggtgacagaagtggtggagaggatgacctggaatctgataccagatgttatggatcctagttcataaggggataaacagcgccaagaagatagatgggtggagtcagcttgggagagactagagtattagagaggtctggaactaattcttctttattgattgattcccccttaggagatacaactcacctttatatagatagaaagacttggcccccaagtaactaactcaattttatctaatctaattccaagtaactaactcaatcttatctaatctaataccatataactaacttaattttatctaatctaatctttatccactaatcctaatcatgagcctatccctacaggcctccatgctcagggctgccgccccatggcaaacgatttacaggattttggttaatggccaaatctcggcatcagtatttgcatagcgctgaaccaggatcctgaaacccaatatcaggcttgaagggtgtgaaactgtgtatggtgtggtttttagtaacctgaccaatctttgtgacagcataaagcagatacaaagtgatgcag

SEQ ID NO: 170 - DNA, 790 bp, Zea mays
tgcatgcctgcagcattggctgtgaacctaccaaccatgtggtcttctcttgtcttttctgtcagcgttagtgcctgtacaaaataatattatgttacgagtccagggtgcagagcatcatccagcatttcagctacgtgttgctttccttctaaaatttagacaagtgggttgttgaagagggttttttaatgcactagatctaatagttattgactaaaattaattgagacatctaaacattctagctaatagttcagttattagctattttttataaattattagttaatagtaggtagctatttatcagctagctaattctattaacaatttttaaccaactaactattagttctatgcatttaaacaccctctaagttaaactggagaacaaaagccgttgttttgtcgtggtcaacgaatgcttcatccgaccttgtggtcatgaaagctttaaatcctcaactggccttctcaagtaagagacagacatcgcatctgcatatatggttgagatctgagatgcatgcacgtggtgaggtacatgtgctgcatctgttctgttcaaggtctgaaatatagttgtggcacaaatctgaaaacactgaggccccgtttgtttcgctggaattgaatttcactttaataattataatttagacaaaactaattaagtttatatatttatatatgtaatatatttatatattattctaaatcatatgagagatattatatactacatttatgttatagcaaagttagtagaatattgtgatataagtgt

SEQ ID NO: 171 - DNA, 752 bp, Zea mays
tgcatgcctgcagacacaccttttagtacttgaaataacatgttattgacatgaatgaagaaggcccctttacccaacaaaagactgtttggggaatttaccaagtttctgagaagatctgctgcatcatctgataactgtaaaaaatgtgcaaattattagcaacacatggtatttgtcacgatgcaatcataagttgttaaaatacaagtgaaaaaagaaaataaaaactgcaaatcatctccagtgagagttcatttacaaaattagcacatcaatgggaaaaagtctgggaaatacttgtccatggtttgaagactataataggtgtttcgtttttaaaggtaaagaagggacacaaaaaaacaaaattctgttcggaacttcagcttggtgcctccccttctacttcaacaatagtttgttcattaaattccgcccgttttggggacaccaaaactcggcaactccactgcacccattgagaaacctattttccactttgcatggtggccgctattttgattgagcaattgaagccattgtcttcccctactgccaaatgctgttagtttaagcattttaaaacagatgggaaaatattagaatttttcgattgatggtttggatataaagataaaagtgaatagagcttgaagtaaattttcattagtacaaatgacagagttctttgtagtataattaactacctattacagtcactttcgtttacacagttctctatctattgc

SEQ ID NO: 172 - DNA, 782 bp, Zea mays
atccatccggatcttgcattgagttgaccatcatcactgccccaggcgtggcgtgccgcacgctccctatgcaaagtgtacgaaatattttatacgcgcatcaaccattccacccatccaaggaggaataaacaagccacttgtctgctaatacaggtgatgaagtgggggaggaactgctgtgtattacaaaagtattattgcctttgtagttcgtgcagataactacttgaaaaactggacaaactgtgctgaaaaggctagtggaattcttaagaatatacagggacaacagtgagctttcgcattcgacctttcagtcacgtacaggttccatttcagcacagcacagcactggaaaggaggtcgaactttttttacctttcagaataacaaacaaatcctagtactagtaccagaaaatgtctacgcttgtttatttggcaggcagctaccagtctgtctatgaggggggtgcgttatggtatctgtactatatagtatacagtctggcaaaagtggcaaagaaagaagacaggcgagaaatcagaatttatgttgtgtgttagggaccaatgccgttcatgaagggagccccccccccccccccccaagccacagccatttatgatggccattcatttccaactacctttaccagcaaacactttcatcatgcattttggaatctttggttccagcaggcaggctcatcataaatgggttttagtaattttgtatccagggtcttttatctccagggttttatagtacaggtttga

SEQ ID NO: 173 - DNA, 779 bp, Zea mays
  misc_feature (776)..(776): n is a, c, g, or t
tggcttgttctggcaatttcaatctcatcttgaatgaggaagataagaataatcccaatctagaccgtgccatgatggggaggttaagaaaatgggctgatgatatggttcttaaggaggttcctctcgttggtcgcaaattcacttggtcgaatggtccggacaaccctacccttgtgaagttggacagggttttctgctctgcctcttgggaggaccgtttccctgattgtttgttacagagttctgcttccagcgactccgaccactgtccactgttgtttgggcttcatgactttaatagaggaaaggggagatttcactttaaggccttttggaccaagatggagggtttccatgaggtggtgtctcaggcctgggaatctgtcccagctggccgatgtcctctcatcaccttttcaaaaaaattgacaacaacatcgagatgtttgcagagctggaatgagaagaaaattggggatgttagaattcagcttgaaatggcaagatatcttttacaccatttggagttggctcaagatattcgtgttttatcccctgctgaagtttggctcaggaattctctcaagaaacattctctagccttatcttctctttcaaggactatggcactgttgagatcaagaattgcgtggctaaaagatgcgagatgctaatacctccttatttcatgccccaagcaagatttagaaagagaaaaaaaaattatatcagctttcattgatggggagggatgccttctgactgctcatgangat

SEQ ID NO: 174 - DNA, 1107 bp, Zea mays
gcttgttgattggcatgcctgcagcggactctgcactgcacgcggtgtcgaactggagaggctgctggtggcgctgcccagacgacggagccacgaggcccagcgccggcacgtacgtaggacccatgcatgcatgctctccgtccggtaggcacacggtggtggccggacagctagccaccgtcgtccgggtctccgtacgaccgcgttgaactgtgcaggtacgtgcaggcgtggacgtcgagctggagcactcgcccagtggcccggccgggccttatctaccttgctcgtggactctggaattctggatcaccgtcgcgccccgcccgcattcattgctcggcgtctacccccagcatgcacacggcagatgagtaactgctggagtcgagtttatggttgcgtgcgacagtgttgtcgcgtcgtcggtcggaccccacatggaagcggatgcgatgcatggcccatcccccctagtggctcgagcagctgctactgtgcgcctgtgtgcccgcaaggccgcaatccatgtgaccatgccggcgcggcgcataccgtacggtccggaatcacggacgcgtaccccctcgcttttgtgcataggaaatgtgcgcgtctttctatgcgcgcgtgcttgcattttgcatgcatcgtcggccctcgccagtcctcttgctactccatccatccatccatgcgtcgaaatctatgccttggtccggccatgcgcggtttcgtacgtacttgttgttcttgggactagactatggacatgtctggtgcagatttttttaccggcttttcccagaatctagctgtggggagaatctaactgtgtagagaatctaattatcattaggattacgtgcagaggaagataacgttgtccatggggctcaagatttataaagtgacggattactactattacgacgactcaaccgattatatatttatgttgattttgaatgatttttatccaaacgaattttatagaaactgtctgaaaagctgagtgtttggtagtccgcagcagattttagtgaccagaaactccgaaaaggcgaaacaaacggggctatatgggcctgcacccgcagtcca

SEQ ID NO: 175 - DNA, 895 bp, Zea mays
atcttagcaaatccttaaaaaaaatggagccagcagaagattgctaatattaggacccagcttgtagttgacaaggagatacgtccatctggaaattgctagggactcgcgagaccttgctcatagtgaagaatggctgagaaggaactgcactgtcttggtttggcctctctggactgtgccattgctaggctgcgacctagagtgttatgtatatgagaaggtggtgccaatactaccttctgccacttgcacgcccgctgccaaaagaaaaaactccaagttgaggatcatatctttacctggcaggaggataagcgggaagctgcccttgatttttatgaaaacctgctcgggtcgactgaagcaaggaacttcacctttgatcttttgactctccagattcagcagcacgacctcgcttccggcttccttagatgagactttctcagaagacgaggtatgggcaacaattagagatatgcccttagacaaggccccaggattcgatggattcactggttgtttttacaattcttgttggcatatcatcaaagaggatgtgttcttgtctctctcagctattcagaatgtccatgttttagattttgtctgctcatctgctgaatgctgtttttatcactcttcttccaaaaaaggtgggtgttattcaattgaaggaattttggccaatcagccttatacatagttttgccaaattgggtactatggtcatggccagttacttggcacccttgctgcccagcatggtgtccattaaccagagtgatttttcttcttgtccagcagatggctagttgtttatacaggatgaaataaccccacattctcctcaagcttgatttttcgaaggccttaaactcggtttcttggt

SEQ ID NO: 176 - DNA, 1023 bp, Zea mays
agaaagaaatttggttaataagtgctcatcaattgataatatatataaaaagcacattctttgttacttcttcaactagataaatgaagcctaaatgtttgccaatgtaacaagtaacaagaattagtgtaaagcaaatgcattctagatttcatgtctagcggtccatgtatatttgataaagagacaagctcacagaaaaatatacaagggtaactaaatatgttgctttatccagataataccatacatgcagaaattttttacagcatgggacctcaatttaaatacagaaacatagcagtgaatctcagtcgacgtaaatggcaagttgcaaagtgactaagtgagccagtgatttgatcagacatttgctagcatctagcgccacaactaaagttgcgacaatgactcggataaggcatgaaaatataaagcctatggggtgtaatcaattaatcatgctcatatccatcgaactgcacaaaaccaacggtccaacgccactgcctaactcagctatctgacacctcccagtttgtcacacgatgtaatgaggaaattaagaaaatttcaatgcgagaacaaatgatttagacattagactaattccccaagagaaagaacacttctgctcacaaacaaacccacaaggacacaacgcagtccaaaagcagatgaaactcggaagagtaactaaattcaggaacatgcacagacccaatctacagctggaactaattcctacaattccaccaatgtgaacccttagaatcgcaacaatgcagaatgcacacatccctctctcaggagggtaacttgccaacactcagttagtcaagctccaaccaaagcccaaaactctgcctcaaaaatcaagcaaacgcaagcatgccaagcatcacacctccaccagtcaacaggggagataacaaacatggagagggaaaggtgtgtaaccttgccgcctccaagtcagccggctggcctgaaaccctaggcaaccaagcaccagcgccacca

SEQ ID NO: 177 - DNA, 781 bp, Zea mays
agggatgctgaaagtaattccatacctagaaacactttcatacactcatttgcctcaacaccagcatctgcacaacaataggaaatagaaagtggcttaaccagttcatctgtatgtcggaaataaacaaaaacggatgaaggcacagaaacgtgcaagggacatccacacagatgaacacacagcgcaattaacttgtatgattgtatctcatagagcaatccttatgggactgatagaaccccaaaagcatgatatctcttcaggtttgcagaaaccaaaacaggtctacagtttgaattatgtcaagtgcactccacaaagaaagcaaaatgaaggaaaatgtaagatgaatagaatgaggttcaccatttccttatcacactttaacctgtgtgactatccaaatcctctaaagacagtgcattaggggcttaaccaaacaaaaggttagatccaatgctccacaagcagacaagcaataaattacagacaatgcacagcctcgatccagaaaacagggcaaagcctaacaatttagcaacttctttccacctcctttttactaatagagaataaactccccacgcttcaatgtcgcaaccaccaaattaagcaaggcagacacatctaaatgagaagcagcagcctctcggctacgctccacaggcatatccggcggaagccgccaggtcaaaataaacataaaaatgaacacacgccggaacccaacaagacagcaggcgcgtcacaacacgaatgggatctgcaggcatgcaag

SEQ ID NO: 178 - DNA, 874 bp, Zea mays
cccggggaccctctagagtctacctgcagaactaagtggtttattagcattaggtatatagcttggattcaaatagttttggaaagagccgatgcattaaagaaactgttggccctgctctcatgggaactagtacagaggcatcatagtcatctactcatctgtattttagtcttcatggactaggaaggatggagatggcttccactggatgatttttatttattttagtaaaacatggcagctgttagctatatgactgagatagattatcaaatcatgtcaatgtaatttctaagtttctggtgtccctatgttcgacaatgttttcttgttgtgatactgagtttctcttttcccttatttttcttttcaggccactcatatcacttgcttatcctctgtaagtatctcctttgtccttagttgactgtctcagtattttcctcttgatactatgtccaggggctaagccaggatttgttttttttttgggagggggacaaatcagattgagggggctgttagggaggtattttagcttatttgcatgatgattagctaaaataattagtggctcctatagaattacaggagcattggggggacattacagagagcctggagcaatgttacagtggctcctaactatgtcccaacctctgcctccctgtcttcgcccctgactatgtcactggcaggagtaaataggaaattggagttgtggctaaagactccggagtccaaaggttttatacttagtagaactaaaatcaaatatatgagatgtgactccggtactactagacatgaggaaagagatgttagttgggtactttggtgtccaagaagaatattttcggtattaatgaac

SEQ ID NO: 179 - DNA, 792 bp, Zea mays
tgagaaatctttatcctcaccatgagaatgtttacctgatgaagataaaccatactttcccatgccaggagaaatgcaactgcgcttctgaatgtttttcagagtctcactggcaggactacttttgcttatttcaaactcagagggttgatgcttcatcacagggccattggattctttcttcattttctttgatgctcgcaggttatcatgatcaacccctacactgcttctcattcgacgtgattgatcttttccaacaatttctcctaaagaaatgtgaatctttagaaacaaaacaacagaaaggtattagtaaacttcaacaacacttaggtggtgcacctttatctgatgattccaccagcttccttttttccttcagtttagagaagtttctacttgaaggagcatgcagattctttgagggctttgacataccagttagtcagcgattgactcccagcttctgtactcatacttgtgctttcgtaaaagctgagtgaatcacctttttaaaaagaaaatagagaaagtatgtaatcgtgagagcaacgatggtatgcctggctgtgatggtgacggcccacgccctaccaattgttacatgaatgattactagtgctaagggcacacattggcatctatatatatctctgtcctataatagtatagctggttcactagaaaagtgcttagcctatttatcactgtcgctgcaccagcttaggtagcttcacgtcagcgttctggctttagtcacttgagttttttttattttgcatgcaatat

SEQ ID NO: 180 - DNA, 474 bp, Zea mays
ggccccctgaaaaaccatgtaaacattgatttcatcaatttggattgtcggctagagacctccccaacacttatcaatttaaaacagaacatttacacatgatgtctctggttatttttttaaatgttttccatcgcctatttggtcaacatttcatacaaaggaagcagtgccgtgttgatcatgactgaactatgtgaattgtttaattttggtagcaaagggtaatctgttagtgctcagtccagaaattggagcatccatgtgctcatttgagatttttaccgtagcacttctatacgaataaaaaataaataagtgattcccaatgtacgactcatgtaattttatttgaagtttgtttgcatccatttaattctctgcttataagttcttgttattttcaattgaacatctcttaagtgtaccttgaagttaatacccttgtaaaacaatccagcaactctcaactca

SEQ ID NO: 181 - DNA, 502 bp, Zea mays
tgttccaaattcttttccagggctcaaaggattccgctccaatgaaaaaagctctgtaggcatctactagacagaatactcaaaacagtcttgcgtttccttatatcgacatctatcttactaatgtttacagggagctatccttgatattttagaacagttttactgtaatttgaaagcagcaattaccttattcatttataccaaactgccaataaggtccattgtcaactgatggatagagtatttaaggctttacttatttctggacaaagtgttttgttactataacaaaagtaaccagtgaggaatttgcatttaattttctgtccaacgcttattatgcatgcaactctatgtttatatagcaccaaaccaccaatgttaattgaagaattaatatcgattctaagtggatgcctgtttcctcatttactttattcattacaaacgttgattgaagaatttctgtaaatactgaatttttattcccttttctgtg

SEQ ID NO: 182 - DNA, 635 bp, Zea mays
tgcagcagtataattttagggttttagctctagtagtactcatccattcataattctggtttatatatgttcaatattccacatgtttatgagaggacaactaaacgtattttgttgaaatgaagtcatcggtcaacaacataggtacatgttctttctatcagatggcattatgaaagcatatttcatagttgtaagaatgtgaagtccctgttgtattgcataggatggttacatatatatatatagactcggaaccctaaccctaataggtcagcagcccaacagtggtgccagtctaactacatatataggaacacacacacactccaacaatagttgcgtccatggtaagcagtttcatgtttttatcagggttcaggatgcttcacatagtggttctaaatcctgaatttgttattaactgatttttagttacttctccttttgagcagctctgaggcatcctagtttgtatccgttttcagttaaccgctttgtacgaaaacaagcattaatcctatcttgatttcctttttaacttgtaatttatgttttttggtcaattgtcatgaataggcatttggctgggcgtatgttaacaattggcacaacacatgggagcaggggtacaa

SEQ ID NO: 183 - DNA, 654 bp, Zea mays
ttgctgaccaccacctagagcctaaatgttcccttggtaggcggatttttagaatactggtttgatggggcagaaaaacatcaaagttgccattatttaccagctataagtagaaattcctgccttatctctgcttccctgcagctatcctatttattcttgtggcggttcctctgtaccaatttgatatttgaatctgtttgattgttccccatccgcaatttcttctatattaagggccagtgtgattgcaggttaagttgttcctgtatcctgtctcttccctgctgcatattgtatattgttatgacaggggattgggacttgaggtggtttggagcctgaaaatgtttctggttccccaaactcatggtctgaaattccatattgttgtttaacgtcactatttgtattgagttttactgtagtctacattttgcattgtaaagtagtactagatctaaagttttatgccctgctcataattctatggtaagctaaatccacataactaggtgatcaagatttcgtaggagtagcaaagcatgcccacagtatgttgtttgttgtgaccttgtcgacctatcatgatttcatctatgacatgaaacaatgtatgccacagtttctgatctgtctccactagtttgctca

SEQ ID NO: 184 - DNA, 715 bp, Zea mays
tgctttcttgagtattttatacttgagtcaatttagttcacagcttggaggcttgagttgttgagctttagcctgactggttggcccatcaaccaaactaccaaaaaagagtgaaaattgaatagacttggccaaccctatatgcccaaagaaagtaagatacaacggccaaaatacaactacacatagaaatagtgattggcttattgtcagtaaaaaaacatttgttgggtggggtacattctccagtttcaaagtaatagctcttccagcaaaaatacattttggtttagatttagaaacaaaattaaatagtctatcaataacttctaaaaatattcagcttcagagaatgaaaattatgtgtagatccattcatggtcttagtgatgatgtgatataactttgcacagtaaataataccaatttaacagtaaaactctgaaagtttttttaaacaaattagtaatcttcatcttgttaggcctggtgcagtggtgagagctgtctcattgagtctctagatcatgggttttttcttgaacacgcaagagagttacgtatcatttcattatgaaaggaaaaaaatacacagggaaaggaatccctaaacaccaagacaaactaacaatgtgacgaaccgaccagccgtcctgagaacaggtgacaacgcaacaacactagcactagcctctgttcgagacccttacaaaca

SEQ ID NO: 185 - DNA, 733 bp, Zea mays
tggcggctactagggcatgtcatgaccagacgtggtcagctcagtgagttgtgatcctgcaataactcaattggtgctctctagagttattggagaatatcaacttagattggattctctctttgttgttctactgtctttgcttagttaagcacttcagccatatgccattcgtaatgaaatagctttggatgttgcagaaaattttgattgacatagagagtcctattttgacctttgtaccactgctttaatttgaatgtggtacaaggagaaacataccaaagttcgaggtaagacactggatcatttgaactttctagcgttgtttagtttcatatttctgccatcatgcatacttaaattgtgaaatgtgtatatgtagttcttaacatatgttaagtagcatgtggttttagttttttaccctcttctaaattgggatatagtctttccgtacctttatgattgaggttatagcagttttttgtgctcaaattaacaaaaaagtatagaataaccacatgcttctattaaacctgcctttttctactttgcaacttaaattaattctcctaaaatgcatacatttgcattgttcaaaactataaatttgtcgattgttccactatttaagatacatttttagatactgtgattgatctcattaaaccatgttggtttctacaaccaacttaacagtcaaggaaaatttacattggtaccggacgca

SEQ ID NO: 186 - DNA, 368 bp, Zea mays
gtcggaagacatggacttcatctctgacgctacccgaacacaccaatggatttaatttgaccagtccgccattaatttaggtgtgttcgtgacaaccgcggaacaacatctccgacgagcccgttccggtttacacgagtcggttgtattcaatccaaggactcagaacgaatcagtgacatactaggactatggtgcttgcgcaaatttggacaggggcaactcgaaacggccggtcaacatgagcaatgtccacagcagtgttcctaggtgacaacgcgtcttccttaagctatggcacagtagcgttcaattggccaagactaggagcttcactggtagtaaggaatgctaaaacatgagtccag

SEQ ID NO: 187 - DNA, 1653 bp, Zea mays
cctcgaggcctggcctgggagtctcccaaaaccccacacaaccctcgacccgaaaaaagacaacatcaagccaccaccaccgccagcaagagcagagaggcgagaccgcgagagtgtacgtgccaccaggagcagcagcagcaatggccgccgccgccaccacctcctcatcctcccacttgctcctcctctcccgccagcaggcggcctccctacgatgccgcctctccttcctcggccagcccagaaggcccggcagggtcacggcccaggcgccggccgctaaggacgtgcggtgcatggcggccgtggacactactgcggcgtccacggcggcggcggagacgagccccaagtcgagcagctacgagatcgtgacgctcacgacgtggctgctgcagcaggagcggaccggcgcgatcgacaacgagatgaccatcgtgctggccagcatatccacggcgtgcaagcagatcgcggcgctggtgcagcgcgcgcccatctccaacctcacgggcgttcagggcgccgtcaacgtgcagggcgaggaccagaagaagctcgatgtcgtctccaacgaggtgttctccaactgcctcaagtcgagcgggcgcaccggcgtgatcgcctcggaggaggaggacgtgcccgtagcggtggagcagagctactccggcaactacatcgtcgtgttcgaccctctcgatggctcctccaacatcgacgccgccgtctccactggctccatcttcggcatctacaaccccaacgatgagtgcctcgccgacgtcggacgacaatgacacccttgattcggtggagcagaggtgcatcgtgaacgtgtgccagccggggagcaacctgctggccgccggctactgcatgtactcgagctcggtgatcttcgtgctcaccgtcggcaccggggtgtacgtgttcacgctggaccccatgtacggcgagttcctgctgacgcaggagaaggtgcatatccccaaggcgggcaagatctacgccttcaacgagggcaactacgcgctctgggacgaccaagctgaagctgtacatggacagcctcaaggagcccggcgactcggggaagccctactccgcgcggtacatcggcagcctcgtcggcgacttccaccgcactctgctctacggagggatctacgggtaccccagggacaagaagagcaagaacggcaagctgcggcttctctacgagtgcgcccccatgagcttcatcgtcgagcaggccggtggcaagggctctgacggccaccagagaattcttgacatcacacctacagagatccaccaaagagtgcctctgtacattgggagcgtggaggaagtggacaaggtggagaaattcctggcttgaatgccagagcctctctcatcagatggactcccgaagacatcaagtttagggagggaatatgcatgtactctctctttcccaccccaaataagtcttcttcatctcatatttcgataaatcaaacaatctcaattttgatctaatatatatacacacacaacattaatatttatagtattagataaaaatattactagattgatcatatcatatctttttatagtaaaatagatacagatataaatataaaaaaaaaaaaaaagggc

SEQ ID NO: 188 - DNA, 993 bp, Zea mays
gagtacgccaccgactcccgatggacaaattcttgaacgctacgagcgatattcctatgctgaaaaggctcttatttcagctgaatctgaaagtgagggaaattggtgccacgaatacaggaaactgaaggccaaaattgagaccatacaaaaatgccacaagcacctgatgggagaggatctagagtctttgaatcccaaagagctccagcaactagagcagcagctggagagctcactgaagcacatcacctcgcgtccgagccaccttatggccgagtctatttctgagctacagaagaaggagaggtcactgcaggaggagaacaaggctctgcagaaggaacttgcggagaggcagaaggccgtcgcgagccggcagcagcaggtgcagtgggaccagcagacacatgcccaggcccagacaagctcatcatcgtcctccttcatgatgaggcaggatcagcagggattgccgcctccacacaacatctgcttcccgccgttgacaatgggagatagaggtgaagagctggctgcggcggcgcagcagcagccactgccggggcaggcgcaaccgcagctccgcatcgcaggtctgccaccatggatgctgagccacctcaatgcataaggagagggtcgatggatcatgacgtacgcgtaccatatggttgctgtgcctgcccccatcgatcgcgagcaatggcacgctcatgcaagtgatcattgctccctgttggttaaaccctagcctatgttcatggcgtcagcaactaagctaaactattgttatgtttgcaagaaagggtaaacccgctagctgtgtaatcttgtccagctaccatgtatgcttgttactgcccagttacccttgaatctaggggcgcttttggtgagagggtgcagtttactttaaacatggttcgtgacttgctgtaaatagtagtattaatcgatttgggcatctagtaagtaaaaaaaaaaaaaaag

SEQ ID NO: 189 - DNA, 1367 bp, Zea mays
ccacgcgtccgtgccaccccttccttcccctaatcccctcctcggtcaaaccgcctcactctcctactcttctctccctagtccctacccggctctctccctcccccctctctctaaaaaaagtagcgcccgcagaaccgagaggctggagaaataaaggcggaaagagggaggcaaatctcactttgttggggattctttcctccgtttccgactcctttgttctcttaagtgttcttggttagtggaatggaagctcagcagccccatttatgcccccgagagcctcgtcgttcccctcgtgtgtaggtgtagcctttcactcggttggtggaagggcagaggcacagtagaacatcgataaagggggggtcgtctattttttagctcttcgtgttcttgtaggaggaattcccgttcacatgatccgtgcctgcatcctcaagagctgtccgggagcctagggttgttgttcagaccacaagtgaggtagacattcttgacgacggttatcggtggcgcaagtatgggcagaaggttgttaagggcaatccaaatccaaggagctactacaaatgtacaaacccgggctgttcagtgcgcaagcatgtggaaagagcatcgcacgatctgaaatcagtcatcacaacgtatgagggaaagcacaaccatgaagttccagcagccagaaatagtgggcaaggcagttccagcgctccatctgcatcacaagctggtggttctcaccgtaggcaagaacctgcacaggccagctttgctcactttggtacggcttctttcagctcgttcggtctcccaccgagtggtcagttgggaccaacaactggcaatttcggcttcgggatggttcccccaggcatgacgatcccagtgccctctctaggatcgcttgcccctgtaaagatggttggaaattcatcagctatgcaggggtacccagggcttatggtgccgggagaaccaaaggtagagcctgtctcgcaaccactcatccaaatggcaaatgcatctccaccagcttaccaacagatattgagcaggcctcctttcggtcaccagatgtaaataataggaaagagaaaggggataatagatttgcttcagcttgtatacatgatagctacgctgcaacatggctttagtgttcatggatcgtccaattttttatttctattttatttttctgcccacgcatgtctttgaagcaaagaatgctgaggatgataccctgtcgtgcctgttgtaatcacgtaaaggatacctttcgtctttttgagactcgaaattggaaaacgatcaatcaaaatttctggttgcgaatgcaaaaaaaaaaaaaaaaaaaaaag

SEQ ID NO: 190 - DNA, 1384 bp, Zea mays
ccgggatcttgggcggctgaacgaacatatgtggacccagccttgcctctccccgtggagaattcaaagctccgccgtgtcctcttctggataccggaagtcgtcgccgtccttggaatggcttggcttccttcgctaggaggttttctttctttccggccgactctgtttcttcgaaccttgctcttccagtcagtcgtccttggctcctcttcttccccacacaaacgcaacggaatagtcccgaccatactggaaaaccggcgaacttgtcaagcaagtcaacaagagtatggcgtccatggagagcctgatcgggatgatgttttgtatccagcgcgcctgcaccgccctcggagaccacggaggaggaagtgacttgcccaccctctgggagtcgctcccaaccatcgccgtcgtcggaggccagagctcgggcaagtcctctgtacttgagagcattgttggcaccgattttcttccccgaggatcgggaattgtcacgcgaaggcctttagtgttgcagctgcaacagacagaggatggatctcaggaatatgcagagttcttgcatatgcccaaaagaaggttttcagactttgcccttgttcgccaagaaattgctgatgagacggataggctgactggaaaaactaagcaaatatctcctgtccctattcatctcagcatctactcgcccaaggttgtgaacttaacaatgattgatcttcctgggttgacaaaagttgctgtagagggacaatctgaaagtattgtgcaagatatagagaatatggttcgctcatatgttgataagcccaactgtattattttggctatatctccagcaaatcaggatattgcaacttctgatgcaattaagctctcaaaagaagttgatccaacaggtgaaaggacgttcggtgtgttgacaaaactggacttaatggacaaaggaacaaatgctctcgatgttcttgagggaagagcctatcggctgcagaatccttgggttggaatcgtcaatcgctcacaagcagatattaataggaaggttgacatgatttcagcgagggaaaaagaaagggaatattttgaaacaagtcctgactatgctcatttatcaagtcgtatgggttctggatatcttgctaagcttctttctcagcatcttgaatctgttatcaaagcacacattcctagtatcacagcgacaatcaacaaaactatagacgaacttgaatcagagctggacatcataaggagagctgtggctgctgatccaggggctcaactggacaccatactggacctctgccgtgcttttgaccgtgttttcaaggaacatcttgatggagggaggtcaggtggagatagaatatac

SEQ ID NO: 191 - DNA, 851 bp, Zea mays
ggccgcttttttttttttttttttgggaaaaacaaatattgattctaaggtacttaggtacatatcaattgaacaattcatttaatcacaatacaagcatacggtcaagggtcagcctctcatggttcctctgaagatggctgatggtttggaggttcaatttcaatgagtgcccacatcttcttcagacatggaacccactgttctccagtcctcttcatgacccgtgccattttatcgaaggacagcaagatgtgaacgacaatgtacatgaaaacagcaacgacgagcgcgaagacgtatacagaagtcttcagtttcctgcagctgccagcagcgtaagccccaagcagagcaagcaggtccagcaccattgccgttttcatggggaggagagacctcctgtacttgcttattgtgctgttgagcagcaggatgactatgaccaccgacgccatgaacgcggtggcgttgcagtagaagaatgccttgtatcgccgtggatcggcgtcatggaggatcgggtcgccggtgaaatggccgtcccggtcatcaggccaaagccctcctggcgggagcagcccagcctggtaggtgacgctcgccgcgaaggtcccaatcagaataagatcttttcgccatttatgctcaggtttctggctggccacgatgcttcgcttgccgtccttggatggatgcggactcttgaaaggagtggcacggagcacccactcgaagaagtagccaaccttctcttttgcaaaggtcagcaccagaagttgagccatgacgtaggcaaaaacaacagcaacagccaggatggcgtacactgaggtggatactctcctgca

SEQ ID NO: 192 - DNA, 1648 bp, Zea mays
cgggaacccgtgcgcccatgcacgcacccgccgcctacgtgcgcctccctacttgcccctgccggcctgccctgttcatgtacccaccacaatcttacacctaggaggacgctacgagctcaagctctgggctgtggcgagcggcgagcattgagtcgaggggcaccgagaagatggcaatgacgcggccgttcttggcgccgctgatgatagtggcggctgttcttctttcacgcatggcggcggcggcagcggacgacggcgacgtgctgctgcaggtgaagagcgcgttcgtcgacgatccccagggggtcttagcgggctggaacgacagtgctggctccggcgccggctcgtcggggttctgttcctggtccggcgtggcgtgcgacgcgtcggggctcagggtcgtgggcctcaacctgtccggcgccgggctggccgggacggtgtcccgcgcgctggcgcggctcgacgcgctggaagcgatcgacctgtcgtcgaacgcgctcacgggccccgtcccggcggcgctcggtgggctacccaacctccagttactgctgctctactccaaccagctcacgggccagattccggcgtcgctgggggcgctctcggcgctccaggtgctccgcttgggagacaacccgggcctgtcgggcgccatcccggacgcgctaggcaagctcggcaacctcaccgtgctcggcctagcctcctgcaacctcaccggcccgatccctgcgagcctcgtgcggctcgacgcgctcacggcgctgaacctgcagcagaacgcgctgtccggcccgataccgcgcggcctcgccggcttggcgagcctccaggcgctcgcgctcgccggcaaccagctcacgggcgcgataccgccggagctcgggacgctcgcggggctccagaagctcaaccttgggaacaactcgctggtgggcgccataccgccggagctcggcgcgctcggcgagctccagtacctcaacctcatgaataatcgcctcaccggccgcgtcccgcgcacgctcgccgcgctctcgcgcgtgcacacgatcgacctgtccggcaacatgctctctggtgcgctgcccgccgagctcggccgcctgccgcagcttactttcttggtgctatccgacaaccaactcaccggcagcgtccccggcgacctgtgcggcggcgatgaagcggagtccagtagcatcgagcaccttatgctctcgatgaacaacttcaccggggagataccggaggggctctcgcggtgccgagcgctgacgcagctcgacctggcgaacaacagcctctccggcgttatccccgccgcgcttggcgagctcggcaacctgacggacctggtcctcaacaacaacagcctctccggcgagctgccgccagagctcttcaacctcactgagctccagacactggcattgtatcacaacaagctcaccggtcgcctgccggacgccatcggccgccttgtgaacctggaggagctgtacctgtacgagaaccagttcaccggcgagataccggagtccatcggggactgcgcgagcttgcagatgatcgatttcttcgggaaccggttcagcgggagcataccggcgtccatggggaacctgtcgca

SEQ ID NO: 193 - DNA, 3587 bp, Zea mays
tttcattcaacagacgccgccgccgtcgccgccgcccctcatccctgtcccgtcccgtcccgcgcgcggccgccgcatccgtccgggcctcctcgtctccccagccccgctgccgccgggttcatcagcagaagctgcttgctccgccgccgccgccctcttcctcctctactggttgtgtctcccaaatatcttgcctttttgttgcattggactcttctgtggttagaatggcagcacccaagcccatttctcgtcttatttctcacgtcattcttgatttggatggcaccctcttaaacacagattctgttgtaagtaaggtagtaaaaccatttattctaaagaatggaaaaacgtgggatagcaagaaagctcacaagctagttgggaagacaccttatgaagctgcagctgttgttttagaagactatggactcccttactctacagaagagttcctctcgatgattactccgatgttcagtgagcagtggagcatccgtccgggcctcttgattgctaatttgaaggaccagtcacatctctctcagtgagctggaatgcatgtgcctgacttgtgggggcatggttttgaaattctcaggccaactttccttcactcgagagcttgatagagagaattcacgaggatggaagagtagcagagaagacactggacctgccaatgtatgccaagtacaaagactcgccttatctgagaaacccttcgaagcacgggagtactatcggtgggacccaggctgagatggattccaagtgagaagccccctggagggccactagataatctgttacttatttgccctatggtaaatgcgtcggtgttgatgcagaaacaattggactcattgtgagcttactcgcttcttttcgaaagtagttagtattcctcgaagtggtgtttttaccttgtaataaaggcaaaacagtattgttacgcggcggtcggggcgctctcagcgtgcacgaggttaggtgcattggatttgggatgacaggcggttgaaatagtgcactaggatgaggtccttgacaacccagtcctgggcactgcactgatcaatatgtatgctaagtgttggagcacaagagaggcatggatggtgttccagcagatgttggagagggacatcattgtttggaatgcgatgatcatggggcttggcatgattggccacgagaagattgcatttgtgcttgttggccagatgaagaactcgggtgtgaagctgaatgataataccttcattggattgctctgcagctgcacacatactagccttgtgaatgatgggcggcggtattttcataacatgactcatgtatacagtataagccctaggattgagcattatggttgtatggttgacctgttgagtcgtgcgggattgctggaggaggctcatcagctgattggtgacatgccaatgctggcaaatgccgttgtatggggagcacgcctcggtggttgcaagatccatcggaatgctgaccttgctgaatatgtgctgaagcagctcatccgactggagccatggaattctgggaactatgtcatgctttctaacatttactcgaacagtggaagatgggaagatgctgcaaagcttaggttggaaatgaaggcaaaggggattgagaaggtcgctgcctctagctgggttgagcttgatgataaggtccacaagttctatgttggggacgattcacatcctctttcagataagatctatgcaaagcttgatgaattgggccacggcataccttgtagattgagcccatagcagcccatatatgaagaatgccaatgtatgccaaggacaaagactcacctagtatcagaaacccttcgaagcacgggggtagtaccaccggtggggccccgtctgagatggattccaagtgccaacccccctacagggcccctagataatctgtaacttattttccctatggtaaatgcgtcggtgttgatgcagaaacaattggactctctgtgagcttactcgcttcttttcggaagtagatagtattcctcgaagtggtgtttttactttgtaatatagaaaaaactaaagtggggttgatttggatggcaccctcttaaacacagattctgttgtaagtaaggtagtaaaaccatttattctaaagaatggaaaaacgtgggatagcaagaaagctcacaagctagttgggaagacaccttatgaagctgcagctgttgttttagaagactatggactcccttactctacagaagagttcctctcgatgattactccgatgttcagtgagcagtggtgcaacttaaaaccacttccaggagctaatcgactgataaaacatttaaagactaacggggtgcctactgctgtggcttcaaactcaccaagatgtaacatagaagccaaaattttcttccaacaagggtggaaagaggtctttctctgcaattgttggtggagatgaagtagagaaggggaagccatccccgaatatatttttggaagctgcaaagagaatgaactgtgctccttcaaattgcttagtaatagaggattccttgccaggtgttacaggtggaaaagctgcagaaatgcatgtcatagctgtaccttcaatacccaaaaagactgctgagttcagttctgctgatgaggtgatcaattccctccttgatgtgaggcctgaaaagtgggggttgccaccatttaatgattggattgaaggtaccttaccaatagaaccatggtttattggtgggcctgtgatcaaaggatttggccgtggttctaaagtactaggaataccaacagcaaatttacccgcggagaatttttccgacgtagtgtcagaacatacatcaggggtatactttggctgggcaggactttcaacgcgtggtatatataagatggttatgagcattggctggaacccatatttcgacaataccgagaagacagtagaaccttggctgcttcatgatttcggcgaggacttctatggcgaggaggtgcgccttgccatcgttggctacataagacctgaggccaactttccttcgctcgagagcttgatagagagaattcacgaggatggaagagtagcagagaaggcactagacctgccaatgtatgccaagtacaaagactcgccttatctgagaaacccttcgaagcacgggagtagtactaccggtgggacccagtctgagatggattccaagtgacaacccccctacagggccactagataatatgttacttattttctctatggtaaatgcgtcggtgttgatgcagaaacaattggactctctgtgagctaactcgcttcttttcggaagtagatagtattcctcgaagtggtgtttttactttgtaatatagaaaaaaataaagtggggttgttgaaacttgagagtcaaattccgagacgttatgcacgttttgatttctgaattaatcgattggtatcacttgtactgtttttataaaaaaaaaaaaaaaaaaaaaaaaaaaaaaaaaaaaaaaaaaaaaaaaaaaattatatttttt

SEQ ID NO: 194 - DNA, 1682 bp, Zea mays
cattgggtacctcgaggccggccgggaatccaagaggagaagaaacaatcaaccagcaacactcttctcttataacatagtacagcgaaggtaactcacatggcaacttccatgggttgtctcgtcttgctctgccttgtttcttctctccttcccagtgccgtccttggccacccatggggtggcttgttcccacagttctatgaccattcgtgccccaaggcgaaggagattgtgcagtccattgtggcacaggctgtggccaaggagaccaggatggcggcatctttagtcagactgcatttccatgactgctttgtcaaggttcaattctgcttcctctgttatgttctttatattacatgctctgacaaagctataaagcttgatactgcagtataatataacaagttagctacacaagttttgtacttcaagtcttttaactatatgttggtgcaataagattatgagtaatccatatgaaggtgttgcaagagaacatgaaaggcaaagataaacggatgaacccattactagctttggctgtatcagaccaataacttgaaatgcacttgtgctagcatgcctaagtattagaaaaggtagcatgggagaatctatattattttggctaacttctttagttactattgattgatgagaaagcctaccattgcccatgccagccctaatgtcccggtgacatgattgagccagtactatgattaatttactctattgttctccttttttgagtgctgtataagatgtcctttttttgagccactcgagaagatgtttacttaactctagtgcgcaatgattggagctctcagtgcaacgcatgtgctctgtaatctactgtcaccactactctgtagtgtgtgcttaaactctaaactattccacgtggctagtaattaccaatcatttacaacactgttacatgtgtagggctgcgatgcttcggtgctgttggacaacagcagcagcatagttagtgagaaagggtccaacccgaacaggaactccctcagggggtttgaggtgatcgaccagattaaggctgctcttgaggctgcctgcccaggcacagtctcctgtgccgacattgttgcccttgcggctcgtgattccaccgccctggtatgttccactatcgacaatcctttccaacctcaaggaacagacatgatatttgtgtgtgtgtgtgtgtgtatatatatatatagtgatagctttggcaaacttagatattttttgaactctaaaccgtaggttggtggaccatactgggacgtgccacttggccggagagactcgctcggtgcaagcatccagggctccaacaatgacatcccagcccccaacaacacactccccactatcatcaccaagttcaagcgccagggcctcaatgggggtgatgttgccgccctctcaggggatttttcttgtatttattaggaacatctggccttcgttattcaccaacttagcgcacactcatattacgcatggatacaatatcatgtgtgaataccggtggccacaccattggtatgtctcggtgcactagtttccggcagaggctatacaaccagacagcaatggcatggctgacagcacactggatgtatcctaccccgcaaagctgaggcagggatagccccggtttg

SEQ ID NO: 195 - DNA, 1618 bp, Zea mays
cacacgccacgccagcgtcttgttccttatccaggattccaagctgagaccatgagaccacgacggggctcacactgtgcacgctctacggccatccatggcgccttatccagcattacacctgcagcagcaggtccacctccggcacgccagcaagccaacgaatccagctccggttcatcatcacgggcatggaaaccccaagcccgacgctgtggcggcgtcgctccggcgaggcgccccggccgacgctcgcggcctccgggcgctaatcaaggcgctgtcgtcgtctgcgtcctccaccagcaccgcggcggcagtgcacgcccacgcaaccaagatcgggctggaccgcgagcgtaccgtccgcaacggcctcatcgcgctctacctcgcgcgcggcgagcgcgccgccgcggggaccctgttcgacgcgttcccgggcgacggccctgacgtggtttcctggacggccatggtgaccgggcacgcgaggctaggcctcgcccgcgacgccgtggcgctgttcctcgcgatgctggagctgggcgacggcgtctccgtcgacgcggtggccgccgccgcggggttcgcggcctgcgcggaggcgcgcgacctcgcgctcgcccgggaggcgcaccggcgcgtcgcggcggcgggcgtcgcgctcgacgtcgtggcctggaacgcgctcgtggacatgtacgccaagtgcggcgacgtcgccgccgcgcgccggtggttccgcaggataccgctgcccaggaccgtcgtgtcctggaacaccatgctcgcggcgctcgcgcgcgccggcgagtacggcgaggcgctggccctgttccgggagatgcagcgcgcgggtgtgtgcccggacggtggcacgttcgtggccgtcctcggcgcgtgcgcccagctcggcgcgctggacaccggacggtgggtgcacgcgtacatgcgccggcagctgggagcgtgacgcagacgccggcggcgttgttagtaacgccctgctcaacatgtacgccaagtgtggcgcggtggaccaggccatgatagtgttcgacggcatggcgctgcgcgacgtgtacacctacgggtcgatgatcgcggggttggccacccacggccgcgccgaggaggccctagcgctattcgcggccatgcggcgaaccggcgtgcggccgaacggcgtgacgctcctcggcgtcctctccgcttgctgccacgccgggctcgtcgacgagggcctccatcacctcggcgccatggcggaggcctacggcgtggcgcctggcatcgagcactacgggtgcgccatcgacatgctcggccgcgcggggaggctggacgaggcggaggcgctcgccgcggcgatgcccgtgccacccgacgcgctcgtccgaggttccctcctcgcggcctgccgcgcgcgcggcaacgtcgagagagccgagcgggtgatgcggcgcgtcgtggtggcggcggacagcggcggtggcgaggccggggaccacgtgctcttgtcgaacatgtacgcgtccaagggacggcatggaagggctgtgcgggtgaggaagcagatgaggaggagcaagatcgtcaaggatcctggctgcag

SEQ ID NO: 196 - DNA, 1859 bp, Zea mays
gcggcgccgtcggcggccacgcgcaggaaactgcagcgcaagttccgcctgcgaggcttcaccctcaaggtggacgccctcgaggaggccgccgccttcctcgaccgcttccccgacgccgaggacgacgcgctcgatctcctcctcgacgagctcgacaaggaacgcgcagtgcagtcgtcgatactggaccgggacgcggtcaggcgcgtggtggcgctgcttgtcgaggccgaggaggcgctcgatgtggcgtcgccagcggccacaagcgcaaggtctgcgctgcgggtggtggacgcgttcctcgtgccgcggttccactacgatccaatcaagaaagtattttacgagcacacaggcagattagctgtccatggagaagctggagataaagcttccctttatagggataggtatcaagtgctgctgcagagactgtctcgtgataaatatttctctaagccggcttttgacacaagtatcactactttccttaacatagaacacaaaatcacgtcaggtttttttgttgaaaaactgtaatcgtagccgaaggtgagctgctttcaaatggcattttccaggtaaatacatgtggatttcctcccctggaggacagagaagcgtcagtctcattgctcatgggttttgatttctttgggggaggtgtaataccaactgaagaaacactaaggttatcatcactggaaaaaaaggctgtgaatgatatgtttgtcattctttcggatgtgtggctggacaatcctgagactatggagaagttggctgttgttcttgacgggtatgatagtgtggaagttgtgccttccctctttgttttaatgggcaatttctgctcccggccttgcaatctagcgttcaattcatttgaagaactcagatttcagttcggaaagcttggcgagatgattgcagctcgatctagattaaaggaacatagtcgtttcttattcattcctggacctgatgatgcaggtccttctaaagccctcccaagatgtgcacttccaaaatatctaattgaagaacttcagaagcacataccaaattcaatcttcgtaagcaacccctgcagggtgaagttttacacacaagaaattgtgtttttccggcaagatctcctttacaggatgcggcggtcatgtctcattccaccaacaacggaagaaacaagtgacccttttgaacacctggtagcaactatcacccatcagagccatctttgtccattgcctcttactgttcaacctatcatatggaattatgatcattgccttcggttgtatccaactcctcacacgattgtattgggtgacaaaagcgagcagaaagccttcaaatatactgggatcacttgctttaatccaggttcgtttgcgaatgacagcaccttcgcagcatatcgtccttgcaccaaagaggttgagctttctgcgttggaaggctaacataaagggagaataaactgaagttctccaatttgatgaagtgtaaagtcttcgacaaattaaagaactgccacttccacacaaggaaccgtgaaaatagcatggctttcatgacgatgtggtgtttctgtgaagagaactgatgctgatatctcatcataggctcagcaaagcagtaggagcagcacattggtgtttgtgcagcatctctagctgtttgtaacaatctttaatactgcacgttagaccagactattttacttgtactgtttagtttttcattgaatcatggtaacaactaacaagattactttctgacagtgctcataactgctgtatcttcatattttgatcacccccctttccaattgttatatttggtagtct

SEQ ID NO: 197 - DNA, 356 bp, Zea mays
tttatatctgaagcagtcaacttgtgcgaccaggtacctaaggaaggcatttttgagaacatacatactatggaagatttgctaaagatgactgaatggacagaagaaaggccactacgtgttgttactggatttggatatgtatgatccaaactcaagcagtctaattcctgctccacgccccaccagttcaccactactacacacatgtgcgctcactgctttgctgattattcaccccagttacattattgtgctgcagctaggcaataagttcttaagagaaaaggttttaagcatgttcgttttttatctgccgatggagctcttgagtcatatcctcctgtgagtctgct

SEQ ID NO: 198 - DNA, 635 bp, Zea mays
ctgcaggccgtgaatcttaaaagcactgaagttatcgaacatccatatgtccagatatttaatgaaggacatcaaaatgttcttgtagagatgttggaaatcataacagtaatttgtgaagagctcaaactacccatagctcagacttgggtgccatgcaaataccaaaatttattgatacattgtggtggtgaaaataagagttgcttcgatattcatgaaagttgtgcccaagaactatgcatgtcaacaagtgctgttatgtttcatattatcgatgctcatatgtggggcttccgagatgcctgtgtagagcaccacctgaagaagggacaaggggtttctggaaaggcttttatcctacgtaggccttgctttacgaaagatgttactagattctctaaaatggagtacccccttgttcactatgctcgtatgtttggattagctggctgtttttcgatatgcttgcaaagtgcttataatagaaatgaggactatgtattggagttcttcttgccacctgattgtagagaagatggtgagcaaaaggttcttttggactccatcttagctctgctgagacagtatcttaatagattgcaggtagccccctgacgaaagctcaaaatgaa

SEQ ID NO: 199 - DNA, 781 bp, Zea mays
ttgcgtaatacgacctcgactcctatgggcgattggggtcctcgaggccggccgggacttacctggacggggtcgactggctatcaagaaggcccgtggcctagatcaatggcccacattgcacttggtggatgcgttggcttaccatctccccaagtgggagagtggacgtcataatttgtggtagatggggtacgcgacgcagttcaggtctcggtttgctgcttcttgatcagttcagatctcggtttgctgcttcttgatccagatcagggtttctgatccatatagtctgtactttgttacaaaaatcatgtaattttaaaactttttcccatatctgggttcctgatttatgaagtctacagttccggcgcctggcccctgccaattctgatttgggttcttttgggccagatctgggttctgaaccatgtagactttgtttcatgagccgttcatgagccgtttatgcgctgcagtctcatccacgaaaaaaagaaatgatgaacagaccgtcggaaaatggcccctaaaaagaaaggagacctggaatttcatctattagatacaataagcgactcgactttgggcaccggatatttgggttctcgcatcgatgaagaacgtaacaaaatgcgatacctggggtgaattgcaaaatcccgcgaaccatcaagtttttgaacgcaggttgcgcccgaagccttctggcggagggcacgtttgcctgggcgtcacgccacttacctgaacggggagaactgcttatcaagaaggc

SEQ ID NO: 200 - DNA, 805 bp, Zea mays
tgcatgcctgcaggcaactcgagctccttgacatatataataattccttcaccgggccactcccagaccaggtggggaacctgtcaacatatctaattgaatttagagcaaatgcaaacaagctatccggtgagcttccgtcgtcattgtcaaacttaagcagccttgttagtatctattttcacgacaacctactcacaggagccataccagaatccatcacacgtttacaaaatctcatcctgtttgatgtcgccagcaaccaaatgtcaggtcgtctcccaacacaaattggcaagctcaagagcctacaacaattctacaccaatggaaacaaattctatggccccatacctgacagcatcggcaaccttacgtcgatagaatacatctacttgtccgataatcagttaaattcaacagtaccatctagcttgttccagcttcccaaacttatctatctggatctttctcataattccctcactggttcactaccggtcgacgttagtgggctaaaacaagtggattttgttgacttatcttccaattatttgtttggaagcatcccagagtcatttggaacacttaagatgctcacttacctagatctatcattcaactcattggagggctcaatcccaggtttgtttcaggagctagaaagcttggcatcattgaacctctcctccaactctctctctggtacaattcctcagttccttgccaatttcacctacttgacagacttgaatctgtctttcaatcgactagaaggaaaggtacccagagggaggtgttttct

SEQ ID NO: 201 - DNA, 1606 bp, Zea mays
ccacgcgtccgcggacgcgtgggagcgaccggccagtgctcccccgaccccgagtcccgaggccgacgccattcctgattcctccatcttccgttccgccgcaccgccgccggagatatgtcgaggctcgctgctgccgccctccgctgcgtcgtcactgcatcgagagatacctcctcatctcgcttcgccgtgtctgcgccggtgtctgctcggctcttctccgcggatgcatccggtgaagccgccgccacggccgcagagtcgcaggatgactctttcttcaaggcatcccgcgaaggattagcctatggaaggttttacagtgtcattggtggaggcagtcgtcttgagaagaacatattgaaaactgatattatccatcaccttgacagatgtggattgtcattggatgatgtgaagattgaatacaacaagggatatgctccattggccgctttgttgaggttttcttcgaaggcaatgtttaccaccgcaattaggcaagcaaatcagaatcgtctgcacaggattgatgagataagtcgtgaaacatgggatctcaaaaagtccttcgatgggaaagcggtattactgcaaggagtcccacgaaatgccctcgcagacgacatagagcggtttttgtgtggcacgaactttgaacctccaccgtttgaaacctttctaagagctggtgtcccagagcccataagaatgatgctggttaaattccacacgaagactgatgcgatgaatgccttcatcaccaaaaacaggagtttctgtctgaacagtcaagttagcatgcgtgttctccagtaactgagtagccagtcgaatctcgtgatgtttgccccggctttgtcaaacaaaaagccttttaagtccgatctgaggtctatccagtatccacaaatgttgccgtattgtgtggttgtgcaggttatattggactggcagcctgctttaggttttgattcctactagtttgtggtttcagctgtactgcaccgcttttatttcatgagtactctggaaaatgtaccaccattccgctttacaatgaaataattaacggcacaaacgctaggggttcgaatcaaaaaaaaaaaaaaaaaaaaaaacaaaaaaaaaaaaaaaaaagcggccggtagctcggtcatcctcgtgcttctatattttcctttacatgtgcctgttcgtgttcctcctatagcttgtcagtttgttctggctctgggtgggtttagggtttaatactttgatgttctcttcccgtttgagaagaccgagtaggaacttaaaagggatagagtggccgacaataaaatataggttgggtgagctatctaagtatctatagatttgatcataaatgtaggttgggtgtcctatccgtgaatttgatggagggatttgatctctaaggactaaggtcatgacatagtaccacgtttggtagggtgaattataggtttcgaagcatgagatatagctctagtttatctgtggaacgctgtgaagtaacactactgccagtataaggtcgtcattgttattgcctctttggaagtttcatcacatgtaagctgaaaaaaacaattta

SEQ ID NO: 202 - DNA, 3835 bp, Zea mays
ggccggccgggaacagaacccaaacctcgccgattcgctccccttcctcaccgcgcgcgtacgccgccgctgcgctcaccttaacgaaccctaaacctgagccaccgccctcccccggaggtccgccgctccgtgtgggactctaggcgtcgccggagccccctccaggggctagcggcggaggaagtcggaaaccgattacccctcccctccccttaccgggggagggagaaactagcggaggaggcgaatcaggtcagagtggggcacgatgaggatcatgatcaagggaggcgtgtggaagaacacggaggacgagatcctcaaggcggccgtgatgaagtacggcaagaaccagtgggcgcgcatctcgtcgctgctcgtccgcaagtccgccaagcagtgcaaggcccgctggtacgagtggctcgatccgtccatcaagaagaccgagtggacaagggaggaggatgagaaattacttcatcttgctaaactcatgcctactcagtggaggacaattgcacctattgtaggtcgaacaccatctcagtgtcttgaacgttatgaaaagctgcttgacgccgcatgtgcaaaggatgaaaattatgaggctaatgatgatcctaggaagctgcggcctggcgagattgacccaaaccctgagtcaaagcccgcacgtcctgatcctgttgatatggatgaagatgaaaaagaaatgctttctgaggctagggcccgcttagctaacactaggggtaaaaaggccaaacggaaggcaagggagaaacaacttgaagaagcaagaaggcttgcttcactacaaaaaaggagagaattgaaggcagctggtattgatacacgccacagaaaaagaaagagaaaggggattgactacaatgctgagattccatttgaaaagagaccaccttcaggtttttatgatactgttggtgaggacagaccacctgaacatgtacagtttccaacaaccattgaggggcttgaagggaagagaagagcagatatagaggcacaattaagaaaacaggatattgccaggaacaagatcctgcagcgacaggatgcccctgctgctataatgcaagcgaataaactaaatgatccagaagctgtcacaaagaggtcaaagctaatgctgccgcctcctcaaatttctgaccacgagctagaggagatagcaaagatgggcagtgctggtgatcctgctttagctgatgagcttggtgaaggaagcactgccacaagaaccttgcttgccagctattctcagactccaaggcttggtatgacaccattgcgaactccgcagcgaactccagctgggaagggtgatgcaatcatgatggaggcagaaaatcttgcacgtctcagagaatcacaaacgcctttattaggaggtgataacccagagcttcatccatcagatttctctggtgttacaccacgcaagaaggagatacagactccaaatccaatggcaacacctttagcaagccctggccctggtatcactccaaggattagtatgacaccatccagagaggggcacagctttggtttaacaccgaaagcaactcctcttcgtgatgaacttaacataaatgaagtggaaatgcaggacaacactaaacttgagcttcgtaggcaagccgaactgaggaaaagcctgcgatctggttttgcttctattccacaaccaaagaatgagtaccagatagtcatgccacctattacggaagatgagaaagaagaagctgaagagaaaattgaagaggacatgtcagacagactggcacgagaaagggctgaggaacaagctaggcatgaggcattgctcagaaagagatccaaagtgttgcagaggagtctgcctaggccaccggctgtttcagtagagattatccggcaatctcttattagaagtggagaaagcagaagcagaagcacctttatgcctcctacatcacttgaacaagctgatgaactaataaatgaggaactccttaggcttcttgagcatgataatgcaaaatatcctcttgatgaaaaaactcaaaaagagaaaaagaaaggaagcaagcgtcagcaaaatggaggacctcttgtccctgaaattgatgattttgatgaagatgaactaaaagaggctagctctatggttgaagaggagattcaataccttcgagtggccatgggtcatgaaaatgaatcttttgaggacttcgtgaaagcacatgatgcatgccaagacgaccttatgttttttcctaccagcaatagctatggtttagctagtgtggctggaaatgctgataagatttctgctttgcaaaatgagtttgaaactgtgaagaagcgaatggatgatgaagctaagaaggcttctcggcttgagcagaagattaagcttctgacacaaggatatcagatacgggctggaaaactgtggtcacaggtccaagatacattcaagcagatggacactgccgcaacagagctcgaatgcttccaagagctgcagaaacaggaacatctcgctgcttcatatcgaatccaaaatttgtctgaagaagtgagtaaacagaaggcactagaaaggaccctccagagccgctacggcgagctggtttctggtttccagaggatccaagaacaggtcgaggagcacaagaggcaactcaaggtacaagaggcggtagaagccgaaagtcacgctcaggaagaggaagctgcggcatcaaatcatgctgctgctgaggaagaggatgaaaggaaggaagatgatgaaaggaaggaagaggatggaagcaagtctctcagctctgaagagaaaccacagcagacaagtacggctaccgatgaagaacctgcaggaagcaaaggaaccaccgaggatcagatggacgtggacagcgggaatggagagggtggagttgtaggccctgtcccaccagcaccagacactgaagggggtaatgacgaagtatcggttcaagagatcagtgaagcccagcccttgccttgaagacggcgctcctttcccttcaagctccgctttcttctcccgcacctggcgatcttcacgatgttgttgttgcacagcaggtccggactgagtatttcctatttggttatatttttagtgcactataatatcgcaagcgaagctacaattggttgtgagctaaatttgcatatccttccctttgttgtattcccttgaacaatgaatcagaacaactgtttaccatttttctaaaggatcgacggcttatgtactcatgcagaactgcctcattgtgcctctggctgaacagcagccaagtaagcatgacatgttcttgttcaaaaaaaaaaaaaaaaaaaaaaaaaaaaaaaacaagagttgttaccactgcaagggggaccacgcgcccaacaagaactacttcgaccccaggtacctgctgtccatgtacggcaacgcgtggggggaccttttcaagggcgccttcctgtgggccaaggagggcaaggacttccgcgagggggccgtttcgttgttttaccgcgcccccggcctgtttgtgcccggcatcgggttgcacagccccagggattacgtcaaccccgtccgcctcggcagggtcgcctcggggtagcttttggattgcatgttcgtttccatgcatgtgtatcattgcatgcaataattggatgaaataaacagcaataagcttcctccaaaaaaaaaaaaaaaaaaaaaaaaaaaaaaaccaaaaaaaaaaaaaaaaaaaaaaaaaaaaaaaactcgagaagggggcccggtacc

SEQ ID NO: 203 - DNA, 168 bp, Zea mays
ctgcagaggttcgcctacgggcaatgttcgcccgctacaacgtcgcgcgcccgcctctgcgcgcggggacttgtcttcagcttgaacgtcttcgccaccgcgcggggacatcgctcagaaaatacgtgcctttgccagcccgtcgtgcaaacaattcacgccagctga

SEQ ID NO: 204 - DNA, 3505 bp, Zea mays
ggccggtccaccctaccttcccgacgggccgcattggattcctcccgtcctcctccgccgcgccagcgcctcctgttcctcttctcccgccgccgctgtacgatcacactagcaccgccagcagcaaggtcccatggacctcgacccggcttaccccacatccgcctgcgccgacgcctggccctttgactcgctcaccacgtccctgctcttctccccgcagctcacgccgataccggccaactcatcctcctcctggctcaccccacactcgccgctctggctcttcgaggaccgccacctgctcccgctcgacgcgcccgccgtcttcgaggaggtccagcggccacgctccgggaattctcacacttcaagcaagccagctgaacagatcagtcacagatggcagtttcatctgtccctggacgaagatggcacagacaactccagcttgttcaaggagaagctgacacacgctcttcgctacttcaaggagtccaccgatcaacatctgctggtccaagtctgggcaccagtcaagaatggagaccgctatgtgctcactacttcaggacagcctttcgtgcttgaccaccagagcattggcctacttcagtacagggctgtatccatgacctacatgttttcagttgatgcggaaaatgttggagacctgggcctacctgggcgtgtctataagcaaaaggtgcccgagtggacaccgaatgtgcagtactatagcagtggtgagtaccaacgacttaaccatgcgatcagctacaacgtccatggtacagtcgccctgcctgtttttgatccttccgctcactcgtgtatcgctgttgttgaacttataatgacatcaaagaagataaactatgcctgcgaggtcgataaagtctgcaaagcacttgaggcggtaaatcttaaaagcactgaaatacatgaccatccaaatgtccagatatgcaatgaaggccgtcaagctgcgctggtcgaaatactggagatcttgaccgtagtatgtgaagagcacaagcttcctttggcacagacctgggttccttgcaagtatagaagtgtcttggcgcatggtggtggtttaaaaaagagctgcttaagttttgatggaagttgcatgggggaagtctgcatgtcaactagtgatgtggcgtttcatgtgattgatgctcatatgtgggggtttagagatgcctgcgtcgagcatcacctacagaggggacaaggagtttctggaaaggcatttatctcacacaaaccttgcttttcaaaagatatccgcaagttctgtaagttggcatatcctcttgtacactatgctcgcatgtttgggttgtctggctgctttgcaatatgcttgcaaagttcttataccgggaatgacgactacatattagagttctttttgccactcgattgtattgacgaagatgaccaaaatgccttactggagtctatattaactctgatgaagcggtgtcttcgtagcctaaagctagttgatgacaatgatttgagtggggtttctcttcaccttagtaatgtgctaaaacttgagaatgaagaatccaaaacagatgcacagtttgatggttcccttcgcgaatcacctgaggatgatagacatggaggatcccacaagtttgataatgagaaccagaaagttttggatatcacagagggacaattgttgactgatgactactctcaagacaatggtacttctgttggcagaccaaatggtagtggtgcttctgattcttcattgcttcacaaaaccaacaaaccccctgaaagaagacgtgggaaagctgaaaagactatcagtttagaggttcttcagcaatatttttctggaagcttgaaaaacgcagctaaaagccttggcgtttgtcctacaaccatgaaacgcatctgccggcagcatggaatttctcgttggccatctcggaaaattaataaggtcaacaggtctctctcgaaattaaagcaggtgatcgagtctgttcaaggctccgatgcggcatttaatctcacatctatcacaggtcctcttcctatacctgttggcccttcaccagagtctctcaatgtagagaaattaactcaaagtaaagtggcagaactttcgaatcttgctgttggtgttgacagagattctttgcagaagtcgcttgaaaatgatgaccattttgatatagtcatggcccagcaaggatttatagacaataacaatgacgtgcagcttgaagctgacaaagcttctcactcgagaagttcatctggagagggcagcataaattcacgcacttcagaaggctcatgccagggaagtccagcaaaccaaacatttgtttgtaagccaatcgcttcaatgttcgcagaacctcaacttaatcaagaggagttcaacaaagaaccttttcaagaaccacaactaccactttcaaggatgctgattgaagattctggtagctccaaagatttgaagaatctcttcacttcaacatcggaccaaccatttttggcccctcccaacaacttggtgtcaatgaagcattcagggactgtaacgataaaggcgagttttaaggaagatattgtgaggttccgtttcccatgctcaggtggtgttattgtattgaaagaggaggtagcgaagaggctaaggatggatgttggcacgttcgatatcaagtatctcgatgatgaccatgagtgggtaaagttggcgtgcaatgcagacttggaagaatgcatggagatctcgcggctttctggcagccatgtcattaggctactggttagcgatattgcagcacactttggcagttcttgtggaagctctggttgatatgcgtgtcagccttttgctttgatcaatgtagactcgaaagttcagttccacttggtagttttgttgctagttagctttagctgtttcattgtgtttgataaatgtatcattgtattttacccccaaaaaaatacatgtaattgtgcagaacgcacttgtagtcaactttgtatatatcatgtgctggaaattctatttcaagttataaaaactgaatttgttattgtctagaaaaaaaaaaaaaaaaaaaaaaaaaaaaaataaaaaaaaaaaaaaaaaaaaaaaaataaaaaataaaagggcggccgctcgcgataaaaaaaaaaaaaaaaaaaaaaaaaaaaaaaaaaaaaaaaaaaaaaaaaaaaaaaaaaaaaaaaaaaaaaaaaaaaaaaaaaaaaaaaaaaaaaaaaaaaaaaaaaaaaaaaaaaaaaaaaaaaaaaaaaaaaaaaaaaaaaaaaaaaaaaaaaaaaaaaaaaaaaaaaaaaaaaaaaaaaaaaaaaaaaaaaaaaaaaaaaaaaaaaaaaaaaaaaaaaaaaaaaaaaaaaaaaaaaaaaaaaaaaaaaaaaaaaaaaaaaaaaaaaaaaaaaaaaaaaaaaaaaaaaaaaaaaaaaaaaaaaaaaaaaa

SEQ ID NO: 205 - DNA, 2520 bp, Zea mays
ggtgtgtgtgggcaagggctgtactgatggagatttgcatgccaagtggggcttgtatttgattggcatggaagaaaaagaaaagaggctgcaggagctgtacctgctggacccagccacgtactcgaccctgacggggatagtggagaaaggaagtgaaggagggcacagcgaggaaggtcgacagctgcgcaagggcgatcctgtggcttgctagatccatggatttcacagctgcgctgttacagaggctggaggaggactctgcgcagcagcagcagcagagcctcgcgcagctcgtggaggccgcgtacgaggccaccctgaagccgtggcacggctggatctcctcggcggcgtgcaagatagcgtggaagctcatccccgagaggaaggtgttcaccggcatgctactggggacgggccatgactgctctgcactcggggacgacgacatcgggcggctcgcgacgttgcttcggcccttccttgatgacatccactccatgatggccaagttcagactggacaggctcaagtcgacgtgatccatggcgaacccgacgcaagcccaagcagcgtcccgtgtcttccttgctcactctcctcaccactaccctgacctgacctgctcccaagctccctctgcctgcctttataaatcaccggggcagagcgactcactgacacacgcccgcttgctccaagaaaccaccgccgagcccaaccgcacaagcgcgcgaggcaggagagagagagagagagaggcggggagcaaaacaatggaggggaaagaggaggacgtgcgcctgggcgcccaacaagttctcggagcgccagcccatcggggacggcggcgcaggggcgccgctgacgacaaggactacaaggagcccccgccggcgccgctgttcgagcccggggagctcaagtcctggtccttctaccgcgcgggcatcgccgagttcgtcgccacctttcctcttcctctacatcaccatcctcaccgtcatgggcgtctccaagtccacctccaagtgcgccaccgtcggcatccagggcatcgcctgggtccttcggaggaatgatcttcgcgctcgtctactgcaccgccggcatctccggaggacacatcaacccagctgtgactttcggggctgttcttagcccagggaagctgtccctgactagggccctcttctacatcatcatgcaatgcctgggtgccatctgtggagctggagtggtgaagggcttccagcagggactttacatgggcaacgggtggtggcgccaatgttgtcgcacctggctacacccaagggtgatggcccttggcgcctgagattgttggcaccttcatcctagtctacaccggtcttctcggccaccgatgccaagaggaatgccaggggactccccatgttcctatcccttgccccactgccatttgggggtccgcggtgttccctggtccaccttgccaccatccccattactggcactggcatcaacccagctaggagccttgggcgctgccatcatctacaacagggatcacgcctggaacgaccattggatcttctgggtcggccccttcattggcgctgccctggctgccatctaccaccaggtgatcatcagagccatcccgttcaagagcaggtcttaagctgccgtggccgtgccgagacatgccagtccgaagaacgggcgtcttcctgtgatgtcttcttgtctgcccacggcctagtttctctgtcgattcctattcgtcgtctcttcagggctggtgctcactgctgcgccgttctgttaaccgaaacaagaactctgtgtattcctgtaccgagctgtgccatgtttttttttttctttccatcgtggagaatttaagttattatatccgtttgctgcaaggtttgccgtctcattttatgcgttgggatgttggcaagaaagggcagatgtcatgtgagaatttaagttattttcatcgaagtgaaatcgattcagggttttcttggtttcagtttcaaaaaaaaaaaaaaaaaaaaaaaaaaaaaaaaaaaaaaaaaaaaaaaaaaaaaaaaaaaaaaaaaaaaaaaaaaaaaaaaaaaaaaaaaaaaaaaaaaaaaaaaaaaaaaaaaaaaaaaaaaaaaaaaaaaaaaaaaaaaaaaaaaaaaaaaaaaaaaaaaaaaaaaaaaaaaaaaaaaaaaaaaaaaaaaaaaaaaaaaaaaaaaaaaaaaaaaaaaaaaaaaaaaaaaaaaaaaaaaaaaaaaaaaaaaaaaaaaaaaaaaaaaaaaaaaaaaaaaaaaaaaaaaaaaaaaaaaaaaaaaaaaaaaaaaaaaaaaaaaaaaaaaaaaaaaaaaaaaaaaaaaaaaaaaaaaaaaaaaaaaaaaaaaaaaaaaaaaaaaaaaaaaaaaaaaaaaaaaaaaaaaaaaaaaaaaaaaaaaaaaaaaaaaaaaaaaaaaaaaaaaaaaaaaaaaaaaaaaaaaaaaaaaaaaaaaaaaaaaaaaa

SEQ ID NO: 206 - DNA, 131 bp, Zea mays
ctgcaggggctcctcatggagtgctgaagctccagccacacaccagaggctgctggaattggacacaacctccataatagcctggatacacgaccttgcagcatcgaacacacaagcattcctgtgtttcc

SEQ ID NO: 207 - DNA, 811 bp, Zea mays
agtctatactaggagctttggttcttatacttcgcgagaagagattttcctctcagaagcttggtagctttatggagttggcattcggcggacgatatgttattcttctgatggcaatattctaatatactgtggccttatatacaatgagttcttctcagttccattccatatatttggcaaatctgcatatgaatgccgggacaaaagctgcagcgatgcacatacttttggtctcatcaaagtccgtgaaccctatccttttggggtggacccaagctggcgtggaagtcggtctgagctaccctttctaaattcattaaagatgaagatgtctatactaatgggtgttgcccagatgaacctggggattgtattaagttattttgatgcacgatatcatggaaatgctcttgacataaggtatcaattcataccacagatgattttcctcaatagcctttttggttacttagcactcctgattcttatcaagtggtgcacgggctctcaagctgatctttatcatgtgatgatatatatgttccttgatcctgctggagatcttggagaaaatcaactgttctggggccaaaaggaacttcagatattgttgttacttctggctttgatcgctgtcccgtggctcctcccccgaccttttatctgaaaaacttcataggagagattcaggtcacacttatcgttctaggacatctgaaatggatccagattctgacctgattcgccgagcacgtatgatgatttcaattcagcgagttttgtgcatcaatgatacatccattgagtt

SEQ ID NO: 208 - DNA, 2081 bp, Zea mays
  misc_feature (28)..(28): n is a, c, g, or t
  misc_feature (843)..(843): n is a, c, g, or t
gtcgaagggcaacatctttcatcacagnagatgtttggtatggaatctatgctggaacaaacccaggtagagcagttataaattatgcggttaatgtaggagattaagtattacttgcagctttaattgcttggttatttttctatatatttaaattttcacgagatggcgttattgcttgatcttttcatatcaagcaaggcttgacatttgtgattttatattaatattttcaatcaaattaacagtcaaacttgctcttcagtttactacttgcaaataaagcaacatccgtttttgttatttttatgagaaaataaaatacaagttaggactatctctgaataaataaaagactcctggtcatagatacatgttgttttaggataagatctggtgaaaacttgaaaattacaaacatcaatatcaaatttatctggtttagaaacatgttaatatatgtctagatttttgtttgaaaatacttgcaaaatctcgtgatttcaagaatttttagaatatgttctagaagaaattggtggtgaaagaaaatatcaaaaccgtgcaaagacaaatgtgacaactatttttcacgggagggagaattccttgctttttatcactctaatcatgcagtacatttactttttcttcttttttcctgctgatgattccaaatgatgtacacaatgttctaattcccaaacatacatgcatgccatggtctgattcccaaacatacttgctatgttgtaatgagcctgcagagacatttgtacgcgccgacggggcattcatcccatttgctcacgacttcgacatctccacagtcacaactacagnttaggggtgttggtgacattggggatgttaaggttatagatctgcagagtccacttaatagcctcatagggaggcaagtatgcaaaatcggcagaagttctggtcacacaacgggaactgtggtggcttatgcccttgaatacaatgacgagaaaggaataagcttcttcactgacctccttgtcgtcggtgagaaccgccaaacatttgatctagaaggtgatagtggaagcctcattatcctgactggccaggacaacgagaagccgcgtcccatcgggataatatggggtggcacagcaaaccgtgggaggctaaagcttaggtgtgaccatggccctcaaaattggaccagtggagttgatcttggccgccttctggatcgtcttgaacttgatcttatcataaccagcgaatcactcaaaggttcggcattttccttgctttcagttatatgtgttttactcgtttttgcatcccttttcagatactggaaaatccactgtgatgtacgcttctgttgctttttgttccacgacagataactgacataatttatcctcgataaagatgccgtgcagcagcaaaggcgcgcgttggtggctgcagctaattctgctgctggggagtcgtcgacagcagcagctcccgtcctagaagagaaagtggaggagatcttcgagcctctggggatcaagattgagcagctgcgtcggcacgacgtttcggcctctgaagcggaggaggcagctgggatcaatgtggaagagcgccagttcatctcaaactttgtgggcaggtcccctgtgcgtgatgaccagggtgctccaaggcaaattgcgaacctgaacaatccgtcagaggaagagctcgccatgttgctgcacctaggcgaccagtagcccaagcggcttcgcagacagaatccgacctcgacgggaaacggcgaagcgctcatttcagtgtctctacatcgaagagtcgcaagtagtccgaagaaggtcacctggagttcagcaaactgaacctgcatcagtagcttagaccagcagcttcctggcacaaacattataatgaactatgctgaaacttgattcagcacttacatgatttgggtggtattcccttcagttttgctgtgctcgtgaagactttaatatgtacaatgctgagtccctgtatcaaaacaatgcaggtagtgataaaatcgtattgatcaccttctcttttctaccatt

SEQ ID NO: 209 - DNA, 1040 bp, Zea mays
tcatccggcctcccgttgaacaagcagtcattatttgggaataatcttcttggcccggcctggggcctgggctcctgtcgggtcgtcgacgaggccagccgacagtctgcggggaccttctttcgactgcttctaaccgacgatccagtgatcggatcggccccctgtagcatggctcctaaggcgccggcgaataatggcgctgtcgtcgttgccggcggccatcacgggggcagcaccgacgtcggcggcgttgccgggggcgcgacgacgacgactgtgccgacgtatgtgacggcgaacggcaacggcaagcagcacggcacgaggaagcagaggcggaggcctgcagcggcagtcgtcagcccgatggacaagtactggacgcccgtcgacgacaaggaggcggcggaggccgtcgaggacggcggcgaggacgggcggcgcccgctccagttccggacgtacaaggtcaagggaatcctcctgcacccctataggttgttgaccttgctgagattgattgcaatcatcctattcttcatatggcgtatccggcatccgcatgccgacggaatgtggctctggtggatatccattgtcggagatttctggtttggtgtcacttggttgctaaaccaagttgcgaagctcaaccctaccaagcgtgtcccagacctttccctcttgagacaacagttcgatctccctgatggcaactctaatctccctaggcttgatgtttttatcaacaccgtcgatcccataaacgagcctatgatatacaccatgaactctatcctgtccattcttgccgtagactacccaatcgataggactgctacctacctctcggatgatggagggtccataatccattacgagggcttgcttgagacagcaaatttcgcgacactctgggttccattttgccgaaaacatagcattgagccgagagcccctgagagctattttgctgtgaagtcgcgcccatacactggaaatgtaccagatgagtttgctgatgatcatagacgcat

SEQ ID NO: 210 - DNA, 159 bp, Zea mays
gcaatttcaagacgagccaccttatacaagatgataagggattatgaccaagctgctaatgatgtaaggaagctaatctctcttcttgaaaagaaagtcaatgtgtctggagtatcaccaaaagcttttaacaagcacaatgatctcaagcaagcacat

SEQ ID NO: 211 - DNA, 364 bp, Zea mays
ctgcagaatagaaagtcgacgaaactagcacggaatcagaatatttgttcttttctgactccatcttctcattctgggctaggctgaaattttgaaggactgattggagggattcagcatcatggcgctctgtagaggaaatgctcttgtggctaggctggttgccaccccaggctttcaatattgtgtctgggtttgactcattttccagtgtggggcctaacttatctggtttgttttgctgcttcagctgagagagcagggacaaggtgggttggctgttcgtagaagtaagcagcaaagagctatcttccgtcggtttgtttgctttctctctgctcaacattgtcctgaaaatgagtac

SEQ ID NO: 212 - DNA, 3093 bp, Zea mays
ttcctgttctgttcgcaccgcctccgcccccctccctccctagtccctccctccctctccccttccggactctctgctctcctctgctgcggccatccattaatctcctctcctcgccatcgctgcactcactctacgcttccctcctcaagcccgagggcttctccgggaaggaatcgccgcgccgggttcctgcaacgccccgccctttgcgcacccggagcaactgagtcgtggctatcgaggatgatgccgcgtttcagataacagagactgtgagagtgcacgacacacttgacatgcagagatgaagatcagtgcgcttctcacctccgcgggcatcaacattggcctctgtgttctattcctgtcactctactccgttctcagaaagcagccggccaatgtcagggtctactttggccgcaggatcgctgaggaacacgatcggctccgaggggcatttatcttggagaggtttgtcccatccactggatggatagtcaaagccctgcagtgtactgaggaagagatcctggctgctgctgggttggatgctgttgttttcaatagaattctagtattcagcatacgcatcttctcccttgccgcagttctgtgtgttttcgggattcttccgctcaattattttggacaggatatacaccatgttcgaattccttcagaatcactagatatatttacaattggcaatgtagaagtgaaatcaagatggctctgggtccattgtgtaaccctgtacataatttctgcagtagcttgcattcttctatacattgagtacaagcacattgccaggttgaagctccttcatcttacaagcgcaacaccaaaaccaaaccattttacagttcttgttcgtggaataccaaaggcagataaagaatcatgcagtgatgttgttgataatttcttcacaaagtatcactcatctagttatctcttccatcaagtagtttacaaagtcgggaaagttcagaagataatgactggcgcaaagaaggcatataagaagttcaaacatttcacagatgaaactgtcgatcaaggttgcaggacagttacctaccgctgttgtctgtgtggagcttcttcaaattctttcaagttgttgaacactgagtgtgagcagaacaaggggaaagcggacaataaatccatcttggacttagacgatgaggaatgcacaactgcttttgtatttttcaaaactcggtatgcagcacttattgcgtcagaaatacttcaaacatctaaccctatgaaatgggttgctaatcttgctccagaaccagaagacgtgtattggtccaatctttggctaccctataagcaactttgggctcgccgtattgctacactcctaggctctatctttttcatgttcatatttctgataccggtgacatttatacaaggactatctcagctagagcagttgcagcagaggcttcctttcctaagaggaatattgaagaagaaatactacatgactcagctagtaactgggtaccttcccagtgtcatactgcaaatcttcctgtacattgttgctccaattatgatgctgttttctacattggagggccctacatctcacagtgaaaggaagagaagtgcttgctgtaaagtgctgtactttacagtttggaacatattctttgctaatgtattatctggtactgtcattagtcaattgaatgtgttatcaagcccaaaggacatacctgtccagcttgctaaagctgtacctggacaggccactttcttcatcacctatgtcctgacctcaggatgggctagtttgtcatctgaagttatgcaactctttggtctgatatggaactttataatcaaatacgttctgagaatgagagaagatacagaattcgttccctcgtttccttaccacacagaagtaccaaaagttctgttgtttggactattgggcttcacattttctgtgctggctcctctgatcttaccttttctgctggtgtacttttgtcttggttatgttgtataccgcaatcagttgctcaatgtgtatcgaacaaggtatgacacaggtggtttgtattggccaattgcatacaacacagtcatattctcacttgtgctcacccagatcatctgccttggtgtatttggccttaaagaatcgccggtagctgcaggcttcactgtacctcttatcatccttactcttttgtttaaccagtactgcagaaaccggcttcttccattattcaagacttttccagcacaggatttaatcgacatggacagggaagatgaacgatcaggaagaatggatgaaattcaccacggacttcattctgcttattgccagttcgctgacactgtagatgtgcccttggataaaattgaaatcgttggtggggatgaggagcaaggctctagctcgggtcagtccagtgttaaagaaacgtgcgaggatcccaagaagcacctggctcaccctacactaaaaggactccctgttaaccgcctccggcatgccgtgaggtcggttactttcctgatcagattgcagaaaagaggtttatcagaacagaaaatcggataattagttagccgccaaccccctttgcttgttggctatataaatgtacagaggcatacatgcatatacgatcgttcccttagaagagagaagggctaatgtagaagtctatgggagaacatcatcatgagtgttgaggtgcaattttgttttgtcgcatggatgagtttgttggttctgcgggttatctggcagattcagctacccaaaccttagccttgcacgttgatgaaattaatgctcatggttttgttgtaagagattaatgtggccaaagtgatctagatgtataatgtcctcctctccattggtttgtgtttgagcctcgcaactttagcaggtctgttagtcttcatgcgccaatcatattgaggtattgagaattatactaattggtttgtctgacaagctgtaagcatgttagtccatgctgtcgagcagcaggtgtggaggttcttaacatgtagcattgagctggtatctgc

SEQ ID NO: 213 - DNA, 331 bp, Zea mays
  misc_feature (23)..(23): n is a, c, g, or t
gcccgtgtccccgacgacgccgnacctgtccttcggctacagcgcgcgcagcgcctgcgccgaccagagcaggctcccgccgctctcgccgtctccttgccccagagtggtggagctcccttcaaaccaatacgcacaaccgacgccgccggcctcggccgccgccaccgcacttggaggtggtggcgcagcgctgccggatcatcagaacgcggcgagcctcgagaagatgctgcgcgagctgcatgacgtcatcaaggtcgacccgccggcgctggtcccggccagcggcggcgctgccctggagtggcatggtggcggaggtgagtag

SEQ ID NO: 214 - DNA, 1674 bp, Zea mays
ccgggaggcccagccaaattttcgttcacctggcttcacccacccgcgtgccctcgccgacaactgagccaccgccgccgccgccctacccccaggtgcccaggtcgtttcggtccctttgccaggtcttcgccggcgacgagcaccagccaccagccagggaatataactttgacctgtaaaatgaggccagttttttgcgggaaccttgactatgatgttcgcatctctgaggtcgagcgccttttcgggaagtatggaagggtggaacgagtggatctgaagacaggaatatcatggagcatatgtgctcttcctggttgatggactggttctacctttactgcctctgcctgagcccccacctcatgcctggtccatctccaggagttcactgtccaccacggcatctgtgcacatggaaacgaccacctcgtgaccgatgtcttacttttacgatcaacactgcatcctcgtaccctgcctgatcaccattccttcgccaatccaaccatgccaatctcatgtctggctggagagtggagataagtggagggtttgcattcatctacatggaagacgaacgtgacgctgaagatgctatcagtagacttgatggaattgattttggcagaaaaggaaggagaatcaaagttgagtggaccaaggaggatcgcactgctgatcgaagaggcaactcaaggaggtctccaaccaatgcaaaaccgaccaaaaccttgttcgtgatcaactttgacccgatcaacacgagaattcgagatctggagaggcactttgataaatatggcagggtcgcgaatgtaaggatcaaaaagaacttcgcctttatacagtttgaggcgcaggaggatgctactagagcattggagggtgctaatgggagccatttcatggacagggtcatctcagttgagtatgcgctccgtgacgacgatgaaaaaggtgaaagggcgacgaacggatacagcccagacaggagaggccgcgaaagatccccaggtgcaagacggtctcctagtccttacggcagaggtcgggagagaggtagcccagactatgggagaggcaaggagaggggcagcccagactacggcaggggaggccgcagccctgatggcaggggaggccgcccagccggcggtggcggcggcggcagaggtgatcacgccaggggaggaggacgacgacgcagccctgactattatgaccgcgagcgccgagaagctagtcctggctatgacaggccccccagctgctcacctggaactgggagggacgcgagagactagaaaagcgccccatgcctgtgttgtagaattcaagcatcaaagcctcccgcgtcagatgaagttagagttggtgatgttagccagcaggaaactcgtttacttatgtgcgttagctcgtgctgactttgcaagttagcttaccatttcccatttgcgactccagaatgtaactcgtatggtctggaatggtagctttcaggactcgtttgaacctttcttggagtttttttcttcttttccggctaccttgattgccctgtgcatgcgctgatgaatctacagattgtttcgtctgtcaagtgttccgctgtaatgtaagagacgaaattatttgttccttgttgatgtagtccctgttttgtgc

SEQ ID NO: 215 - DNA, 581 bp, Zea mays
ctagggtctttcattggcactgtaattggaaatatcaagttatccattggcaatattcatatcagatacgaagacgtagagagatgacttgtttcctgtagcaatcctggccacccttttgcagcaggtctggtactttcaaagctttcagcagttacagtggatgaccttggcaaggagacttttgccacaggtggtgatttggaccgagtgaaaaaggtaccgcttcacacatcaagcatttttcacatttggtgtgcttatttgttttagtttgaccttttttacttttgatcaatttgcgtgacttctttaacttggcattttgcagtctgttgaacttgagagtctggcggtgtattttgactctgatagcagtccttggattgtggataaaccctgggaggatttacttccatcagagtggagtcaggtttttgagtttcaggagcaggatggttccagatctgcttcgaaaaagcatgcctacattttacagcctgtatctggcaaagcaaaatatacaaagatacaacttactgaggcaaagaaaacaggacaagcattgcaaaatactgcag

SEQ ID NO: 216 - DNA, 633 bp, Zea mays
cttgcatgcctgcaggcgcaggcacggttctcgaggcgccgccgccgccgcatcatggtttgaacggctgtgtgctgacgctaattgcgctttcttgcaggcggctggggatcgcgacggcgctggtggagcgcgcggaggagtggtggcgtgagcgcggtgcggcgcacgcgacgatggcgacgaccacgtccaacgcggcgtcactggcgctgttcacgggccggttcgggtacacgccgttccggcggccggagttcctgggaaggccggtgcacgcgcaccgcctgcccatcccgagcgcgcaccgcgtgttccagctgccgccgccgctggcggccgcggcctacgcgcgcctgtccccgccgcaggccacggagttcctccccgccgacatgccggcgctgctggcccacaagctcacgctgggcacgttcgtggccgtcgagagcggcccgccggagccggaccagtccgcgcccccgtccttcgccgtgctcagcgtctgggactccacccgctccatgcgcctccgcgtgcgcggcgcgcgcgcgctgctccgcgcgtcgctcgccgcgctcatggcgctcgaccgtggcgcgccgtggatgcgcgtaccctgcgtgccggaca

SEQ ID NO: 217 - DNA, 1119 bp, Zea mays
ctgcagtacaatataacaagttagcgacacaagtaattaccaatcatttacaacactgttacatgtgtagggctgcgatgcttcggtgctgttggacaacagcagcagcatagttagtgagaaagggtccaacccgaacaggaactccctcagggggtttgaggtgatcgaccagattaaggctgctcttgaggctgcctgcccaggcacagtctcctgtgccgacattgttgccctcgcggctcgtgattccaccgccctggttggtggaccatactgggacgtgccacttggccggagagactcgctcggtgcaagcatccaaggctccaacaatgacatcccagcccccaacaacacactccccactatcatcaccaagttcaagcgccagggcctcaatgttgttgatgttgtcgccctctcaggtggtcacaccattggtatgtctcggtgcactagtttccggcagaggctatacaaccagacaggcaatggcatggctgacagcacactggatgtatcctacgccgcacagctgaggcagggatgcccccgctctggtggtgacaacaacctcttccccttggacttcatcacccctgccaagtttgacaatttttactacaagaacctcctggctggcaagggccttctaagctctgatgagattctgttaaccaagagcgctgagacagcggccctcgtgaaggcatatgctgctgatgtcaatctcttcttccagcactttgcacagtctatggtgaatatgggcaacatctcgccactgacagggtcacaaggtgagatcaggaagaactgcaggaggctcaacaatgaccactgagggcactgaagtcgcttgatgtgctgaattgttcgtgatgttggtggcgtattttgtttaaataagtaagcatggctgtgattttatcatatgatcgatctttggggttttatttaacacattgtaaaatgtgtatctattaataactcaatgtataagatgtgttcattcttcggttgccatagatctgcttatttgacctgtgatgttttgactcccaaaaccaaaatcacaactcaataaactcatggaatatgtccacctgtttcttg

SEQ ID NO: 218 - DNA, 352 bp, Zea mays
ctgcagcatcttcgctgggttctccaccatggatcgtccaacgcgccttgtgcacctcgccattgcgggcttctccctccggattgcatgtttggctgtggtcgctgtcttcgtgctggcggcgtaccttgccttcgctccaatcgatccgcacatcgccgctgcggcatgtgtgctcccgcttctcgcggcacttcttagaaggcttttccaaaagcacgcatcgcccaaacttcgcaatgcattgcaattcgcaaggggattcttccagaaccacatatctccaatagtcggatgtatcaaagccaagctcccgcaaagcctctcagccatcataacagatctagttccc

SEQ ID NO: 219 - DNA, 1255 bp, Zea mays
gaaataaaatcaacaagcaagcatgtgaaacaaacataaaattttcagtacgataaagttgcagcacagctgcaaattaattagctatagcagttgataaactgtttaaatcgctaatatctaaacgacaaattcccacaaccttgtaacaccaaggtgtaccagaacgcaaagtctgtatctttggcaacagaaaagctgtggatacgctgatgtgcgtaagcagcctcacaaaaattcaccaagcaaaatggtgtccctcccccttggacccctacttcacagtcaggagcttgatgacggatgaaatcccgatgcggtgcagggccacaacggattgaccggtgttgcatagccccatcgtcttcgcattttcaatggcaaaaccaatagcttcgtcagtggcttcgttgtcaaaggccttggcagtggcggcactcagcattgggatgacacccctcacaatgaggctgtgccttgccggaccctcgtcactgcaggcccagtcgaacgagtctgtcttcagctcaggaaccacaacggacagaatcggcatggatggcctatacttggctacaagcctagcagtagttcctcccctggtcaggaccaagataagtgctgccctggcagagtttgctgtgcgaacagctgatgatgcaaggctctccaatggactcattggaattggagctgaagccatgattgatttgaaaatagcagcatggtctacgcaagactctgcttgcaggcagatcttagccatagtctgcaccgccaactctggataggccccagcagcagtctcaccactgagcataacacagtctgtgccatcaagaactgcgtttgcaacatccgttgcttctgcccgagtagggcgaggagacttgatcatagattccaacatctgggttgcagtcacaacaggcttgccttgaatattgcacttgaaaatcatcaccttctgtgcaaagaaaatcttctctataggaatttccatccctaaatcacctctcgccaccataaaagcatcagagtttgccaggatatcatcaaagttagctactccctcttgattctcaacctttgacatcagcattatggacttggcatgctcaccaagtaccttcctaacctccacaagatccgaacccttccgaacaaatgacaaggcaatcatgtcaatcttgtttggaacaccccatttaaggatgtcctccttgtccttgtctgtgagtgtggggagatcaac

SEQ ID NO: 220 - DNA, 234 bp, Zea mays
ggttggcatcaggaggcatgcaatgcaatgccagaccaccacaagtaggaacccgcaaaggccgaatcctccccctaattacaagcaagccgagccccagtcatcgcctctttctccaagagcctagcccagagacggtggctgctgagaacaggcatggaagcaaaaggcgtgtgtgtgcagcagtaggtaaagatcaatcatatggggagaaaggagggagcgaaacagaaa

SEQ ID NO: 221 - DNA, 1597 bp, Zea mays
ttttttcatatcacacatcacattgcagcccaccgacacacgtacagtatggatattgttttaatcgggcggcgttcaagtaaaatttcagcgtgccgtgcatacaatctcattatctgttcctcaaaagtccaccaaaccatccgcagctaagctagtgacgtggcatcacacgccgattgacctccactccatcgcacccttgcctccttcattctaacacgactacatgccgtcaaaactagagacccagctgctgtctacacaccattgccatcgccatcgcctatcacaggcaggcagcttctcagtcgtgctaatacatttgctactcaggtcaggcatccctggaagcctccttctgcagtgtcttcctcatgaaatccgagatcctcgaggacgccatgacacccctctctatgcagttgaaatagtcatcctcggacattgctccatgcgtgatgcaagttatcaatcctcgctcggactcctcatctcgctgtgtcgtgtccttcgattcgactgacttgcgcgagttcggaaacaccaggtgagcaaacgacctagcttgctgctcttctgctctgctagtgtctaagataaccacaccattgtccatcactccacagctaatcgcgacagcgagatgtttcatagggattccagcaaatgcaagagcagcacaagaagcattaattgcacatgacataagctaagcactgtcaaggaaacaaggactagcttcgattgaaaaaaagaagctactcatattttgagttaaaaggtcttggagtgcgcatgatgttttggcaacgaactacatttcaaggaagagccaaagatatccgacaaagattcaactctctctaattccaaacctagttgatgtgaccgattcgctcatgccttcatacattattccctataagttactacctaattgatcctagcaaatttatcaaaaaaatcattagctaacagtcagtagactaaagtttgaagctttaatattgaatgcaggacaacaaacacaataaacataaaagcagccaaactatattactgctacatcaagtggaaagatacagaaccatcatcacccacaacctgaagcacgacagaggtggtgttaggatgaactgtgagcaagcagatgctctgcaacgtcctcttgagtgtcatctcatattccctctcttgccttcctgcaaaaacaactcgccatttcagtgacccggtaacacgcgcagccgtggggcgaagcgaactcgaggggaagagcagggtaccgatctggccggtcttgggcttccacacgacctcgatggaggccttctcggggttctcgcccttccgggttcccgacttgggcccgtacacagcggccagcacgacggtgtcgccctgcgcccaccgcgcggagccgtgggcgcggtggagcgggttcccggtgcaggtgaacggccggagctggttcggattccgcccatccgcgcggctacctccctccatcatcccctcccactacgctccggttgtccacggcggcggcggcggcgcagggagaaaccagataggcgctagaaccctactcctc

SEQ ID NO: 222 - DNA, 161 bp, Zea mays
ctgcagtatgaggaatcattaactggaggatcatttgatgaaggaaatatggtcaagaacattgaagcctgtgactggttaaccagtgctataaagaacctagaagcgtccaacatagacccaatctatgtaaagttgcgtgctgtaggttccctctcttc

SEQ ID NO: 223 - DNA, 1294 bp, Zea mays
  misc_feature (1291)..(1291): n is a, c, g, or t
actttcttcttttttttcaagctaaaccacgagcgggcgcggggcgactgggcgaggcgagctgccaaggattcgaccgttgcgttctccgcccaaatcttagaaatcccaatcccagatcgtcctccaatttcaaacttctcgactcgcccctccccgtccggccgtcccacccacgcttcctccccctccgcgccgctcctacaggctctaaccatggcggtcgccaccgagtcgcgcggcagcgaggacagggcttcagccatgcgaaccaggagaagcggtgggtgctgtctgatttcgaggttgggaaacctcttgggaggggcaagtttggccatgtttatcttgccagagaaaaaaggagtagtgagattgtggctttgaaagttcttttcaagagccagctcaagcaatcacaggttgagcatcagctgcgacgtgaagtggagattcagagtcatcttcgccatcctaatattcttcgcctgtatgggtacttctatgatcagaccagggtttacctaatcctggaatacgctgccaagggtgaactgtataaggaactgacaaggtgtaaacatttttcagagcgacgcacagcgacttatgtcgcatcgttggctagagctttgatctaccttcatggcaagcatgttatccatcgggacattaaaccagagaatcttttagttggagttcagggcgagatcaaaattgccgactttggctggtccgtgcacaccttcaacagaagacggactatgtgcggaactctggattacctgccacctgaaatggtggagaaggcagaacatgattaccatgttgatatatggagccttggtgttctgtgctatgagttcctttacggggtcccacctttcgaagctaaggagcactcagaaacctacagaaggatagtgaaagtcgacttgaagttcccactgaaaccattcgtttcacctgccgcaaaggacttgatttctcagatgctggtcaagagctcggcgcagcggctgcctctccacaaggttcttgagcacccgtggatcgtccagaacgccgacccttccggcgtgtacagagaaggtagatccgtctaagcttctgttgcagtgtcgcccgccccaccccaaactgtatggattagcgaccctgttgaacaatcttcttacttgtctctctctatatatgaatatgaatgtacatgttctaagcctctctggctctctgaagatttttgtaatattcaatatgacagcccatatgagcctcaaaaaaaaaaccnaac

SEQ ID NO: 224 - DNA, 1639 bp, Zea mays
cacttccaaacatcctttggcctttgcctttgaatgtatagtatgtatcaatttgcctaacctaattgacttggcgtgccccctttttctttgtatgtctcgatacttaggtagaaatttacacatcacagatggggttcaatgttaatagttacgttccagaattaagatcactctgttataattttatcgattattcctccagcaccaaacagcaggacaagcgcttattcctcaacagggcaagactcgtgcttaagcgatctagaagatttacaatttatggatggttttcatgtctgctgccccctgcagagtcccttgctcgacatgatcccaccagcccatgagaaagttgtccaccaccagcctgaaccaaggggagagcttaacgccatcttccccggcatcggctttcctgagcagctccttcagctgatgccggttcatgtacttgacatcggccacctcttcaggattcgggtcgagcttcacgtcacgaaccatgaacaagaggtaatccaactcgtgttcgccccattttccatctgaaggagccttgtaaagcatcctcccaagcggaatgaactggtcgacaggtaattcgtcagccactattcccagctcatcaaatagtttgcgctgggctgcatttctcacccctgcacaattttcctcaatcaactctgactcgcggtagagaggatggctacagcaggtgtttgtcaagacaatgtcatcggccacgagtccaagtataactgccatctcatggagaagatagaagctggaaatgccctgcacagagctttcagtgttttccttttcaactccaaatatgagttgctactgcagcaaaggtctgcaacaaaagtgacatttccacttgtctggacaaacacctgcggtagagaggatggctacagcacggacgcgtggtcagagttgattgaggaaaattgtgcagtcgccatctcttattctgttcagcgcggagaaatgcagcccagcgcaaactatttgatgaactgggaatagttgctgacgaattacctgttgaccagttcatcctccttgggaggatgctttacatggctccttcagatggaaaatggggcgaacacgagttggattacctcctgttcatggttcgtgacgtgaagctcaacccgaatcctgaagaggtggccgacgtcaagtacgtgaaccgcgatcagctgaaggagctgctcaggaaagctgatgctggggaagatggcgttaagatgtccccttggttcaggctggtggtggacaacttcctcatgggttggtgggatcatgtcgagcaagggactctgcagggggcagcggacatgaaaaccatccataaattgtaagcctgtagtcttgtagatccgcgaagcacgtgctgtgctccgttgagaaataagcgtttctgcaggtgtttgcgctgcctttgttttagccatcattctgatggaaatagtcgataaagtcataatagagtgctcttaaatagggaacataactatttatattgaaacccgtctatgatgtgtaaatttctaccgaatgaatggaattatggaaatcatagtaaaaaaaaaaaaagaaaaaaaaaagggggggcgcgcta

SEQ ID NO: 225 - DNA, 133 bp, Zea mays
cggtagagcctatcgtctgtaaccggaaggtctcaggttcaagcacagcctctgcatattatgcggataaggcttggcgcttaaagatacccttccctagaccccgcacagtgcgggaagcctacggcattgg

SEQ ID NO: 226 - DNA, 355 bp, Zea mays
gcagctatactagttgctcgtatattcagtagagtagtcttgttttttttacctaacttaaggagagtatgtccacaggctggtaatcatgtgaaggatgatgtatggcatgctcttatagttctagtgagtaatgcatctgaacttcaaggatattcagtcaggtcattatataaagcattgcaagcatctagtgaacaggaaagtttagttagggtggctgtttggtgcatcggtgaatatggagaaatgctggtcaacaatcttagtatgttggacatggaggaaccaattacggtaacagaatatgatgctgtggatgccgtagaggctgctcttcagcgctactctgcag

SEQ ID NO: 227 - DNA, 1222 bp, Zea mays
  misc_feature (48)..(48): n is a, c, g, or t
  misc_feature (73)..(73): n is a, c, g, or t
caaaagaagtgacgaattccccgcagccagtaaaagaaagctgcaggnaagggggtcaaactaaaccaagggnaaatgttataactccgcgagtgaagccagagatcaacacacactcagcacccattctggcaggcaacttaccggatccgtccgagagatcttggcaaacgaagccatcttcagccaaactttcgtacaagcttccaatgccagttgatgacaaggatcccagatctgcaggtgctcagagaccacatcattcacagcagctggagagtaagcctcgtgtctcagcgaatccgtggcattcgtctccactgacgaaagacttcaggccgggtggccacgtgaaaacgccaccaagtgcggagggggcctcggcgttctcccagccggtctctgatttcaagaagatgaagaggcagttctattctggtccaatggcaagcggaccagggttaagcatgccatcttcgctgaacgatcgcagatcatccgcggcacaagcacagcatcttgtgatgccaggaaatttgcaaggcctcttctggcagccgtcatctgcgtccccaaaagttccccccaagatgttggggcggcatccaacgaaatcaccaaggatcagcgagctgcacgagctgcctaggcctcctccagccagcgtggagtccctcaggccttctggtttggtcggctactctggtcctctggtatccaagcgtcagactcagatccctgcagccacagcccgtgtgtcgccgacagcgtcacgaaccccctcgccgcttccaccgccgcctgctaccctgactcgcagctactccataccatcaaatagccagaggataccgatcgtcaccgcggacagattgttggaggctagaaatagcagggacggcagcgatatttattcgccgccacttacccctttgtcactgactgatttgtcccagcagcaaggaacgaaaactactgcaggtggcacaaggatgaagggggccttatgacataaatcaaccaaatgcagactgatcttagttgattttgtaagtagtgatgtattttaggttcatattcatgatattcttttattcatcgtctgtattacaaatgaaaaggacggaaaagtaatatatacttttcttacacagtagtgatgtattgtaggttcatattcattatatattgtttcattaaaaaaaaaaaaaaaaaagtccac

SEQ ID NO: 228 - DNA, 784 bp, Zea mays
ggccgagaagcacgtaaataaatttcatttttccccctgtcgtcctcctctgcttaactcccttcacctccacctccgcctcggcgtcgtcgtgcgcttcgatctctccccccatttccacgcggaggggaggcgtcggcgcaataaaaggcggcgcttttgcatcgcccctccccggcatgcgtagctagcctcgcggctggcccccacgccatgcagaccaccgggcccgcatcgccggataagccgccagttgttgacccggaggccgacgacaaggtggaggaaggggcgcgggcgaaggaggacgatgcggcgaaagtgagcggcgaggatgaggatgaggaagagcaggaggggaggagaggcaggcggcagcggcgccggcgaggcggtgcggcgggggacagctccgtggccatggtgaagcgggagctgctcgcgcgctgcttgacgtgcccgctctgcgaccgcctgctccggaaggccaccaccatctccgagtgcctccatacattttgtagaaattgtatctataataagatcaatgatgaggatctggaccactgtccagtatgtaaaattgatctgggctgcactccagtcgataagcttagagctgatcacaatatacaggatgtgagatcaaaagtttttcccttcaaaaggaagaaggttaatgctgaagaggcagaatctcccattatgctacctgttaaagttaaagagaggtctatctcatcgttggtggtcaatacacctagagtaacccagcagcttcaca

SEQ ID NO: 229 - DNA, 1802 bp, Zea mays
  misc_feature (1732)..(1732): n is a, c, g, or t
  misc_feature (1735)..(1739): n is a, c, g, or t
  misc_feature (1758)..(1759): n is a, c, g, or t
gggcagagcactgcacacccgaacacaactcgctagctctgcatcatccgtgttctggtgagcgagcgagcgagagacctagctagactgaccggcggccgccggcagcgccgagaacgaagcgtttgtgcatgagccatggcggaacagcagcagccacagcagcagccgcaggagatggacgttgaccgtaccggtggcctcgaactgcctccagggttccgcttccacccgagcgactttgagattgtcaacgactacctcacgaataaggtgcacgacagggactacagctgcatcgccatcgcggacgccgacctaaacaagaccgagccatgggacctcccgaaagttgcaaagatgggcgagaaggagtggtacttcttctaccagaaggaccgcaagtacccgacggggctgagggcgaaccgggccactgaggcgggttattggaaggcgaccggcaaggacaaggaggtctacgatccccttgcagcggaagggctgctgctggtcggcatgaagaagacgctcgtgttctacaagggcagggctcccaggggtgacaaaaccaactgggtgatgcacgagtacaggctcgaaggcagtggtaggctccctgctagtcctgcatccgcatccggctcagccaccaacatcgctgcggccatgatgaaagcttcagcttcggcttgcaaggatgagtgggtggtctgtcgtgtgttcaacaagaccaccgggatcaagaagacggctgcgccggcataccaggtggccatggccggtgctgagatggatcagaatcagaacaacattccggccatccccatccccatgccgctgcagctgccactgcccgtgcccatgcagatgcaatttcccatcctgccagattttgccatggacccggtggccccctactaccccaacccaaatgccggcgcggggatgatgccgcctatggcattggcaggtatgggtggcgccggcgggctccagatcaacggcgctctgttcggcaatccggtgcccgcgccgctgccgatgaacttctaccaccaccagatgggcatgggggcagcagctggccaggtggacatgggggcagcggctggccagatggacatgggagcagctggcgctggcgctggcggcttcgacgttgcagcgccggagagtaggccgtcctcgatggtgtcacagaaggacgagcaggctaatgccgccgagatctcgtcgatgatgtctgtgaccggcccagggtccgcgaccaccaccatagagatggatggcatatggaagtacaagtactgaaaaagtggatatggagtttggagacaaatgcatgaatatgcatgttatatctactatatctgcattgcattttgtgaaaatttgcatggttcctatatttctgcaataactagtcggtaagatatgtgtgcatgcatgtgctagtatatacatgcattgtatcattgcatgtgtggtatatgtgtgtgtcgtttggtcttagtaatccggggcatgatggtacccatacctggatttacatctgcttggtcgtgctgatgttgtgttgtaatttgtaaaaagcagattgaagttcggtacagtatattatcgtgaacctatatatattatacttgtgtgaaaaaaaaaaaaaaaaaaaaaaaaaaaaaaaaaaaaaaaaaaaaaaaaaaaaaaaaaaaaaaaaaaaaaaaaaaaaaanaannnnnggaaaaaaaaaaaaaaaannggggccgatttttttttttttttttcctccaaaggttttttta

SEQ ID NO: 230 - DNA, 3114 bp, Zea mays
atggtggcagctgcaaatgctgccaaccgagcaggggatgcaaaatcatctggtgccggcaatacattgccgccatctgccagtgctcacactttggcaacaaactctggtgccgcggccatgaacttgagctttgccaacatgcaaccggctgatgcccagtttttggcaatcttacagaatggatacccgttccaggttgctgcccatcctggagggcctccatatcgaggcatggcaccgccaggcccagctgttccattcttcaatggtcatgtgtattcctcccccatgctgcacccatcacagcagcaaggtgcgcagtcacaaagtcatcagaagacccaaatgccaaacttgcccagttcatcacagaagcatcagccacaacagtcccaaggcctgttgggatacgcaccaaatactaatgcagcagcagctgctagtaattcacagaattattcaagtggcaatcagcgccctgtcctgctacctggccttgtgcaccgacaggagagtgacaaaactggacaagattgtccatctagtgatgacaagccatctcactcccagaagagtgggtatgaacacaattttgccgttccagtccatctaccgaattttgcaatgatgccagccgctcaacctgctgtcagtcagagtgagaagaagttaagtgaccaccagcaccaccagcaacagcagcagccacaagtcagccgaggccagggtgtgaggattgatcttgcctcttctcagccttttgtgatgccctttggctccattggtcctcctggatctaccccaagtggtcttgacttttcggcattggcgcagaaccatgcagttttccagagccatcaagatgcagcaaggcatggttatccccagcttaattttgctgcagctcaacctgtgcaatccacgcagcagaagccccagcaccaaatgactggagaaacaaaaactgttgcgggggattcatcctcgactcccattgctggagacagtgagagaaagaaatcaacttctcacaagtattctagtgattcacaacagcattcgctgtccttcaccaggacggaaagcaagaattatgtgcctcctttccttactggcaacacaaatgaaacttcgtcccgcaccctgagccttatcggaacagaatcttcaaatgcattcatgggaagcaaacccacaaattccaacacccctgcctctaccgccgctgcagcttcggccagcatttctcagcagcagcagcagcaccttcagatgcaagcgcaacaaaagcaccagcagcatcagcagctaattcagcatcaccatctgaatcggcccagatctgctgcaccaagtacacagaacagtgcaggtgggtaccaagaccgtataaacatggctaattttcagaatatgatgtacccatcaagtgctgcccaagggagagttcaatccccccagttgaaggcatcctcagggagagggacaccttcatctactgctacgactacccctgccgccacaccccctaatttgattatgatgaagaacagtagcctccaccagcaacaagcaaaagtccctatgcaggctctctacactcctggtcaccaatcacagacttccttaagttcatcaaaggtaggaccttctctaacaaacctttctaccggaggaggggatctatctcgatcttcaaacgcccctgttgcttctggttcaccatccaattcggtgtccaaaagtaccggtggcagcccacccgccacaggaaatgcaaagggtgttcagcagcctgtccaactgccatcaccacagcagcagtcagccaagaactccgcgtcgacgtctggctccaggactactcccacgaatcatttcagtatggccatgccatccatccttggccagcagcctaatgcatcgcctggttccaatcctgggagcaagcagcactcacatacgcagccagcatcgatgaaacagcagccattcccgcaaggccatttcttcatatccaacacctacgctcctccggctccgggagccggaggtgctgctgccctaggcctctaccagaagcgaccaggcgacaagacgcagcagcagcagcagcagcaggcatcgcaccagcagagcgccatgtcaggttcgtccgcaaccccttccatgtcctttggatccgtttcggcttcctctgccgtgaccctcgctgacccagggaaactcttgctcgcagctgccggcggcaataacgtgaaagcactccatccttcatccggcgggtttatgcatctcgcagcccagtctgcaggtggcatggcgcacacccacgtgtcggcggggcaactgactgtgcgaacaatgccgacgcctttaaaaccgtcaagcgaccagaagcctgctgctggaaaataaacagtccagacgaccatgcatcggagtggtaatctgcatcggcaagctaactgcttattcaggggaagcgcaaatggcagccacacctctccggttctttagaagagaagcaatctcagcaacagcggcagctcgaagaacccgcttggctgctgtggtgatcaggaaggaaggccgctgcgcaccagttccatcggagcagaagccttgctaacctaaaagagtattcggattttggaatggttgatgggagtgatacttttgtgtagtttggctggttgtcctcccatgggttaaaggccggaggaggtgcatagaatctgtctcttagcccgttttttatgcatggatggatgtccaaagctggtttctctgtctccatctttcatgtagcttcagtccttttttttttggttctcagctttaactggaggaggaaagtttcaattagaatgcagatcaggtaactttgttcatcggagtggtaaacctgaactggtttttgcctgttcagcggaagctcaaatggcagaatcgcaacaacagtagcatcggcagctcaaaagaacccgcgtggaagctcaaatggcccgttcggttgctgttgatgaggaaggaaggaagagtgccgtgcaccaattcgctccgagcaagaatcaaatgtcatcgtaacttaaaacagattgttcacat

SEQ ID NO: 231 - DNA, 546 bp, Zea mays
tttaagtggctcgagctgtacttccattggttcaggtgacaaattagactccattttactgactaccctgttagattgcaaaagttcgactgtatcatcttcctcagtgttgccaagcacccaatttcctgaaagaccatcaacacctgctgtccttcgcttaattgccatatactcaaagtaagctgttaacaaagtaacacttataacccataagattagcccgcatgtaagtcccttgatagtcttactgccatatcggtgcccaagatgctgcaagccagtaaagagcgccaaggtaccagcaagcgcagcagatctcccggtcaaaacatggagatattcccaaactactctgtttccaggcggggtctctccattctctgttttatgcggtcgaagatacgcatttactagctgcatagatgcgaatgtcaatgctactgcaccgattcgagcatgtctggatttgaaagagaaacctcggagctcagcaactgcaaatacaacacccaagaacatgacagctatgcttgaatactgcag

SEQ ID NO: 232 - DNA, 2147 bp, Zea mays
attttcgttctggacgctgcttgcttccacagctccaccgtcatccattgcatcgcgtaatcctgcaggtgcagctaccggcatcctatcgcggcttcgcttcgagacggaaggctgtcccgcgaggtgtggagccgagaggggttcgccgtccgagaagggttcacatcacctcttcctctgccccccctccggtctgtcttcggggtctcccattggtggctgcagttgttttgatgggaactcagtaaccgctcgagaggagaggaaaggagcggatgctcaactgtagcaggaagatgggtagatccgcgagtgttcttcaagtccttctggtttccgcaaccatcgttgttgctcagacccaatgggctagtggtgtatggggcatgtactgcgaggacttgacagcgagtgtagaaaggccgcacagggcctcggtaaccgatttcggcgccgtcggagatggtgcgactcttaacacgaaggcgtttcagaatgcgctcttccacctcgactcattcgcgaagaagggcggggcgcagctgttcgtgcctgctgggaggtggttgactgggagttttagcctgatcagccatctcacgctgtcgctggataaggacgcagtgattcttggatcaccagactcctctgactggccagtgattgatgctcttccatcctatgggcgcggtagagaactccccggcaaaagacatcaaagtctaatatttggatccaatcttaccgatgtgataataaccggtgccaatggcaccgtctatggccagggtgcggtttggtgggactggtttcacaaccacacattgaactatactagaccaccgctcgttgagctgatgtactctaccagagttgttatttccaacctgaccttcataaattcgccgttctggaatatccatcctgtgtactgcaggttcctttcgaggatttcctcttgtcatttattactgaagcaccgtttcaatcgcgatggtaattatcatcctttgtaccgtatttttcccccccgaatgaacagccaggttctggtccagcatctcacaatcctagcacctatcagttcaccaaacaccgacggcatcgatccagactcatccacaaacgtctgcatcgaagactgctacgtcagaaacggcgacgacattgtcgtcatcaagagcgggtgggacgagtacggcatctccttcgcccaccccagctccaacatcagcatccgcaacatcacaggacagacaaggaacagcgccgggctcgcctttggaagcgagatgtcaggcggcatatcggacgtccgagcggagggggtccggatcgtcaactcggtgcacgggatccgcatcaagacagccccggggcgcggagggtacgtgaagaacgtgtatgtagctgacgtcagcttcgacaacgtttccatagccatcaggatcactggaaactatggtgaacaccctgacgatggctacgacaggaacgcgcttcccaccataagcaacataaccatcaaggatgtcgtgggtgtcaaaattggtgttgcaggaatgctgcagggcattccgggggatagcttcagtggcatctgcttgtcaaatgtttctctaagtgtcaggtctactgatccatggaattgttcacttgtcgaagggtattcgagctctgtgtcacctgaggtgtgcgagcaactgagagccactcctgggcccggacagatgtgctatggcggtaactatccggcagctgcggcacaaccgcagccgccgcagaagtcaggtgctagccggctggtaagtcctttcctctcgataagttggtttctacgtaggtaaccttgagcatagtatctacttatcatttccccccccctgttcccacttcccagcagcttggtaattgtagtttatggagttcagtaccatgtactcttgttccaaaaactatttgctggggcatgtaggtactgattattcttactcagaaatggaatggatttgtttgacttgaaaaaaaaaaaaaaaagttctgttgaaacacgtcaggttctgggctggcttgtccttgtaagatacgggtaccggcatagaacttggtttctcctcgcaaacgaacttccagggttattcaac

SEQ ID NO: 233 - DNA, 1524 bp, Zea mays
ggttcctccaccaaccaattcgcttctccgtcaacatcacttcatcgtcgacgcctccgtcccaccaaccatgccggcggccatggcggctgcggcggcgcagaggctcctcgcggcgagcacgaaaatcatcggcgttgggcgcaactacatagcccacgccaaggagctcggcaatccggtccccaaggagcccgtcctgttcctgaagccgacctcgtcgtttctccacgctggtgtggccaccgccgccgtcgagatcccggagccgctcgagtcgctacaccacgaggtcgagctcgccgtcgtcatctcccggcgtgggcgcgacgttcccgaggcgtccgccatggactttgttggaggttatgcacttgctttggacatgacagcaagggaccttcagtctgttgctaagtctgcaggccttccatggactttggctaaaggacaagacaccttcaccccaattagtgcagtagttccaaaatcagctgtcactaatcccgatgatctcgagctctggctgaaggtctctcaaatgtgtactgaatttgtttaatgttacctgaattgctagagcatatggtgtacaattgactaccaactgcatccaggtagatgatgaactaaggcagaaaggaccgacaagcgacatgctattcaagattccttttctgataagctatatcagttccatcatgacattaatggagggtgatgtgatactaacaggtactcctgagggtgtgggtcctgtccgagtaggtcagaagattacagctggtataactgacctaattgatgttgagttcgatgttcagaggcgcaatcggtcattttccacgtgacgcaataagcaagaaagtaatggtgaatacaaagtgcagtactcgtcctcgaccttgaatcgcattactggacctggagccattgcagatagctcttgagccttaccttgatttaatttacctgggttttgagagactatctatgaatatgctaactcgttcgtaaagtatctttttgtcccaattttgattgatggagctttaagcttgcttttctgtatgcaataaaaaaacttatcacatttttctttctttctttctttccagcagcgacttgaaacagcttccgagtggggtgcacggccgatctatgtaacgtacgcgcataagaaatggtgtcctacaaaatgccttccacttgcttgaaacgatatgtagatggacagcgacgacgaacaccttaactccctctcgctagatatcgagccagcttagttcggttcgactgagcttgagctgactcgttaaggtaaagagatgacttggttcgttaaacaattgagtcagagaattagcttggctcgtttgcaagtttgggctggctcgtttacctcgcgagtaaaaaaatacatgtatatataaaatagtatagtcaattgctagttaattttatacaaatttaacattagaaaagagtaattatactcataatttcatatatattacatctttt

SEQ ID NO: 234 - DNA, 1011 bp, Zea mays
atgcacaccgcggccaccaagcctctcctcgtcttcgtcttcgttttcttcacgtccatggcggtcgtctcccatgcatcgtccctacgcttccaatacatcgaccgtcgtcacaacttcaccgccaagcaggcgagcacctcctcctcgtcgtccccgtcctctgcacacggcagccgcgaccgccgcccttcgttcgcgctagtgcgccgcgacgcagtcaccggctcgacgtacccctcgcgtcgccacgcggtgctcgacctcgtggcccgcgacaatgcgcgcgccgagtacctcgctagtcgcctgtcccccgcggcgtaccagccgacgggcttctccggctcggagtcgaaggtggtgtcgggcctcgacgagggcagcggcgagtacttcgtccgcgtcggcatcggctcgccgcccacggagcagtacctcgtggtggactccggcagcgacgtcatctgggtgcagtgcaagccgtgcctggagtgctacgcgcaggcggacccgctcttcgaccccgccacgtcggcgaccttctccgccgtgccgtgcggctcggccgtctgccggacgctgcgtacctccgggtgcggcgactccggtgggtgcgactacgaggtgtcctacggggacgggtcctacaccaagggcgcgctcgcgctggagacgctcacgctgggcggcacggcggtggagggcgtcgccattggctgcggccaccgcaaccgcggcctcttcgtcggggcggcggggctgctgggcctcggctggggccccatgtcgctggtcgggcagctcggcggcgcggccggcggcgcgttcagctactgcctcgcgagccgcggcgtcgtcggcgacgccgggtcgctcgtgctcggtcggagcgaggcggtgccggagggcgccgtgtgggtgccgctcgtgcggaacccgcaggcgccgagcttctactacgtcggcctgtccgggatcggcgtcggcgacgagaggctgcccctgcag

SEQ ID NO: 235 - DNA, 2055 bp, Zea mays
atggccacggaatcgccaggtgcggagacaccacaagctcagctctggaagacgacgacgatgggatggcgacgctggattgggcggccaagctgtctggcccaccactctgacgaggctgcacttttccgggcgggctgggtggctgggcaacggccacgcgacgcgacgcgtgtgtgggccagatcactcaggtggaaattattgggctgggccgtatctgtccgaggcccacttgtctggcctcgcttcgttgtcttgtattactgggccgttttgctgaagagacacacccgccggcgactaacaaaaccctcgccagcctttcccgtccgccggccgccgctaatggacgccggcgacgcctccaccgcgcttgccctcacggcggcggaaccatcaccgccgagccccaacaggaggggcaagaggccgaccaacccgcccaagcgcttcgtgcacaccccgatcccgccttcaatcctctcggacccgaccctggccgccgccgccacctccctcctcccggccaactacaactttgagctccacaagacggcgcaccgcatacggtccgcggccgctcgccgcgtggcgctgcagctccccgagggcctgctcctcttcgcgctcccactgtcgcacctcctcgcgccctacctcgagcccggcgccgacaacgacgtcctcgtcctcgccgacgccacctacggggcctgctgcctcgctgaccgccccgccagggcgctcgccgccgacctcctcgtccactacggccactcctgcctcgtccccgtcacggcctcactcctcccggtgctctacgtcttcgtcgagatccgcgtggacgccgcccgcctcgccgccgccgtcagagccgccttcccggacccagcggccgcgccccgcctcgccatcgccgggaccgtgcagttcatcgccgcggtccacgccgcgcgcgagatgctcacggtagagggctaccacgacatcgtcgtgccgcaggcgaagccgctgtccgccggcgagatcctgggttgcaccgccccgacgctcaagaagtcggaggaggtgggcgccgtggtgttcgtcgccgacgggaggttccacctcgaggcgtttatgatcgccaatcccggggtgaaggcctaccgtttcgacccattcctcggggttctcgtgctggaggagtatgaccatgttggcatgaagcaggcgaggaaagcggcggtgctggcggccaggaaggccaagagctggggagtcgtacttggcaccctggggaggcaggggagcaccaaggttcttgacagggtggtggagcatttggaggagaaagagttggaacacacagtggtgctcatgtcggagctttccccggcgaggatggagctatttggagattccattgatgcctgggtgcaaattgcttgtccacgcttgtcgatcgactggggggagggtttcaagaagccagtgctgacaacgttcgagtttgatgtcgcactgggctatgtccctgggtggtgggagaaggggagcaggggttgcggtagtgaatgtggtgttgggtgttgttcaggatcaggaactcgtggaaactgcaactgcagtgatggggattatggtggtgactacccgatggattattattcgcaagatggaggtgattggaatagctgctacatgaagaagaagccatctactggcgagaggaaactgcgggttcggattggcaacgaaattcaagccgaggagaagcgtgggaatcaggattctcgtgagctagtcaggtgaatagggataccgagaacagcttcatggctcaaaaaggatttttgacaccaggttttagtgtgattgtaacgatgtttagttaccagagggaaaatcttgtgactgtacctgtatcgatgtatccaccaccccatatactgtaaatttgttacgtacaatgtctcattgtaaacatcttgagaaggtatgaggtgttgtcatacccattggtgcaaccatccaaaaaaaaaaaaaaaaaaaagggcggcggacgcgtgg

SEQ ID NO: 236 - DNA, 992 bp, Zea mays
aaaatcaacctcatcatattttattgtgtaaaattgtagaccttgcatagtatccatgcaatccattcatacatcgatgaaaaacaaggaacttgtctggtaaatccaaagctttgttgccgataatgcgactagaaggcagagccggaaaatgcgtctgcgtctggggttgctctgtatctagcccgggcagtttgatattgttctggtaaacatacagttccaaggctccatcatcccgaaaaatttttgctcgacaccctcgagagtgtagtggtcctacagactcttcgtcaacaagaacagcaataaccttctctttcccgtgcctaccatcaggaatctcaaacattgcttctgtcaaaatgccctccattatagaccgcagtcctcgggctcctgcttcttttgcgagcgccttctttgctatcatcctcaaagcattatcagtgaaatgaagcttgaccttatggaggaaacatgaacataaataactttcttggttataaattatcgtttaaagtaaaaaaaaatcggccaaatgttgcaattatttcgttggccaaaacgaatcacaaactaacatcattcattttgaatagcttcttgtattgctttcctattgcgtttttgggctccatgagcacctgcaaagagaatttctaatattttgaggtggtggaaatatttgagatggtaattttaagaaatattgctttaaattaaaaaatcaaagaaatttactacttgaaccaattgctcttcactaagattggtcaggccaactgttattggcaaccttccaataaattctgggatcaggccgtaggcaatcaaatcatcattttcaacctaagtgggaaaccatttgggaaaacctttgttgtcaatgcagaatcaaacaaaaattgtctaaaacaatgccaactgctgaagcaattgaacctacagtatcaatagaggaagattcctgaacagttctccagctgcag

SEQ ID NO: 237 - DNA, 4600 bp, Zea mays
aattcggcacgaggcgcctcgcctccatccacagcgaccacgcccatcttcgctctgtccgctcacccccacctctccgcccccgtctccgtccgcacccgtccgcctccgacttccccgtggcccagccggatccggagccgaactcgaccttgttcaggaaggagagcccgaaccgcggcgggcgggagggctctttttagcttgccccgcctgaggccagccgccccatgggccagtcgcctgagcgcgctacgtatcagctcatcgaccggcgggaaggtactggtttcctgtttccctgtttcttctctagatagatctggtgaattccacgaagatctggtccgaatcgggtacactgggtcggtcggttggtaattcctgttccgtgtgtggagttaaaaaacagctcttcttttttcacgccgctgtaggctgtagcgtcggttggacgtcgtgagcgtgcagagcaattaagcaaagcaggtgcactctttgctcaacttttttattgctattttggctgcgctcaagtgtaattattagtatgattgtggctggagttgcaagcaattgatgggtttgaagccttgagggcttcagtttgagaacggctactagggcagcatctcaagtttatccgttgctggctcatttgataacagcattaattcgttattttgttgcctattgtctgcttcgattgctgtttatgtatgtatacacaacaatgtttagttgaccagaaaaaaaaacatacacggcgttcgctttagctaaagcacagctgcaaccgctgcagctatggctggaaactactcagtgaagcactgttgaatggctgcagcagtcgtctgtttaagctcagctgaacagcttatagttgtgaaattggagggtgcaaacgaacaccatgttgcaaagaaaacacttcctttatgatgcagtaccctgctgcatcttcttttagtaaaggacgcatgcatatgagtgacaggaaacatctgctttttgtttctgtttgaacatgctatcggttttgggaaagaaagctacaattcttgggtctttgggaattaccaatttgattgatgttggtggtggcataaccgcctcactgtgactgggataataaggaaaatgctttctgaagcaatagcgataaggaggctcttctaagaaaaccttggccgcactgtctaatttatttaattgtggttttcattataggaaccaggaagtcatttattactattcaagtattatcctattgtaaagatctactaacaaagagctacctgatgctttctgattattatatctacttcatctggccgtaaatatagatacatctaggtttgtcgtaagtcaaacttagtcaactttgaccatcaataaaaaatttatgtacattgacaataggagattgttgttattagattcacttttaaaaacagtttcatttaagataagacttctatgtatatggatagtcaaagtttaaaaaatagcttgagttgggacaagcatggatggacatatttatggtagggggaagtaattgtgtgtgaataataaatggctgtagccaacctgtaagtagggactttattcttgtagaccactgcatttttaagagtatttcactgacaagttttctatttaggctacattgatgaaccttgaaaagtctactttttagtgttcgtccaaggattgggtgctccaccatgcctttacataactcttttttccatttcttcgcagggcttgggtaaatcattattgaaagcatctcccttttacatgtaaccttgcatacaatatctgttaagatgagttcactaaataaagttgtttcaaatagtggagatgcatgttcagtcttagctagtaaagtcacatcattaaatcccaatgcagcggagtttgtaccgtcatttgttaaaccatcttttggaaatggtacagttctagataagtcagatttcaggggttcttctggaaaaacaattctagataggcctgagccatcaaagtctaataactcagatgatgaggcacaccagttttggcataagcagcttccggatgacattattccagacttcacttcttttgagaaagttgaacaagggcctgaactgtcccttgctggattatccttgaatgcaccccccttttatgggacaacttccagtcgcttctcaagagaatatcacgaattatcttctccagttaccaagggcctggaactggaactagaacatactaatatgctatatgaagataaaagcaactgggagcaaaattatattggtgatcttcatattgctaatggaaaccaggaccttcattatgattctgaatctggtgtaagcttttctgatagctttgctagtgagtatgttgccccatcagatggcctttttgctcccctggagtacttggcatctcagttccctggattttcagcagagagccttgcagagctttactacgcaaatgggtgtgatttcaaccatactattgaaatcctcacccagctagaggtaattccttctttactgcaacactaatttaagtcttccagatatccactcagaattagctttacccccaaaagggaagtgattaaattcatgctcttttgctcagatatcagatcagtgttctttagaattattgtcaaaagtggtttggaagttttttttgggacatctgtggttggaaatattctttttgttccaattataagatgtgctggcttctttctagatacatgtcttttgctatgcacctagatatacattatatctagatacatagtaaaagctatatctctagaaaagctagaaggtcttataatttggaaaggagtaattattagatatacattatatctagatacatagtaaaagctatatctctagaaaagctagaaggtcttataatttggaaaggagtaattattatacgcaatggaatatgtctcccaccatttcaatcaaaatgttcggttgccacctgttagacaagaaccatatactagcatgagatttttttgtggagctcatcaagcatgccatggactggttgcacagcatcgttatcatgctgtttataagagtactatttactaaagcagtaatgctacatgaaaagacaatttgaatcatcacatctttgattgcaatgctgcattgattttataatgcttggttacatccagaacattttggcactatccataattatgttttctctgatttttcagatgcaagttgatgctacacccaatcacacactgaatctgccccacagcacaccgaacttcagcactggggatttccctgcacttccaacagctgaggaccaaaatggtttcaatcagggtaatgtggatgtacttggcatgttcaatgggcgcagttcatctgcgatgcctactggagctggtgattttgtttcagccgttcgcaaacttgcatcgcagaactctggccagtggaagtttaaaaaaggtcctgagtatggtaatggcatttcagctctttctgtacccaagcagtacagttctagcactaaacaatcgtctgggaacaagtttcaaagcatcagcagtggaagagttgccccatggcttgagactggtgatgcagtgggtaatactcatctgatactctgaagtctttctggtccatattgcacagttccctctacgtttcatgtttggatgagtattgctcttgcccgttttcttcatttagtgaaaaatcgggaatggatagatagaaatcagggagaattatgctaacttttgagttcctttactgtgatccaattatcgctgattaatttgtctctgtatatgcaatccaccagcaagtatgtactcagaatcaaggggagaggctcgtgattttgctagggtccggaatacctgctttgagcaggctagacaggcttacttggttggcaacaaggctcttgcgaaggagctcagcatgaaggggcaggcctacaatgtgcaaatgaaagcggctcatgagaaagctagagaagctatttaccgacaaaggaatcctgtttcttcccaacgtgggggtggtgaccacctgattgatttacatggcctgcatgtgaacgaagcaatccacatcctgaagggtgagctcaccgccttgaagagcgcggcgagggcagcaggggagaggatgcaagtcatggtttgcgttggaacaggccaccacaccaagggctctcgcactgcgaggttgcccatcgctgtggagcagttcctgctggatgaaggcctccagtacacgcagcctcaggcgggtctgctccgagtgatggtgtactaacatctcttaggtgagacatcacggtgaggaaaaaaactccaaaaaaagagaaaagagatgtacgaaaacgcaggaaaaaaaagcgtcgttggagcacgcactgttattccgtgtagctgtatattaaaagaggcagcaggagaatagcctgacaacaggatacagtgtaaaattatacgtagcttccttcattcaattcaaaaaaaaaaaaaaaaaaaaaaaaaaaaaaa

SEQ ID NO: 238 - DNA, 2704 bp, Zea mays
  misc_feature (2463)..(2463): n is a, c, g, or t
tgggtccctcgggccggccgggaattgatgccctttcccagatgaccgacactgaacatactgagcgctacattttctcgttcgagaaagccaagccagaactctgattctggccctcctccccatcgcgtctgtccgctacccctccccgaccagatcgctacgagacgccgcgcgatccgacccaggccgacgccgacgacccctctcgccgccggcggccatggcgtacggcgaccggcgtcaccaccttcgaggactccgagaaggagagcgagtacggctatgtccgcaaggtctctggacctgtggttgtggctgatggaatgggtggtgctgccatgtatgaacttgttcgtgtcggacatgataacctcattggggaaattatccgtcttgagggcgattcagctacaatccaagtttatgaggaaacagctggactgatggttaatgaccctgtattgagaacaagaaagcctctttcagttgaattgggacctggaattcttggaaacatttttgacggtatccagcgacctctaaaaaccatcgctattaagtcaggagatgtgtatattcctcgtggtgtttcagttcctgcccttgacaaagatgtattgtgggaatttcagccaacgaagctaggtgttggagatgtcatcacaggtggagatctatacgctactgtttttgagaacacattgatgcagcaccatgttgctcttccaccgggttctatggggaaaataagttacattgcaccagctggccagtacaacctgcaggacacagtgctagaattggaatttcagggcataaaaaagaaatttaccatgcttcagacatggcctgtgcgttcaccaaggcctgttgcatcgaagcttgctgcggatacacctcttctgacagggcagcgtgtactggatgcactattcccctcggttctgggaggcacttgtgctattccaggagcatttggctgtggtaaaactgtcattagtcaggcactttccaagtactccaattccgaagctgtggtttatgtgggctgtggtgaacgaggaaacgagatggctgaggttctcatggactttccccagttgacgatgacattgcctgatggccgtgaggagtctgtcatgaagagaacaacactggtggctaacacatcaaacatgcctgtcgctgctcgtgaagcttccatttacactggaattacaattgctgagtatttccgtgatatgggctacaacgtcagtatgatggctgactccacctcccggtgggctgaggcattgcgtgagatctcagggcgtttggctgaaatgcctgctgatagtggttacccagcttacttggctgcacgtttggcatccttttatgaacgtgctggtaaggtaaaatgtctgggaagtccagacaggaatggcagtgtcacaattgttggagctgtctctcctcctggtggtgatttttcagaccctgttacctccgcaaccctcagtattgttcaggtcttctggggtttagataaaaagctcgctcaaaggaagcatttcccatctgtgaattggctcatttcctattcgaaatactccaaggcccttgagtctttttacgagaaatttgatccagatttcattgatattaggacaaaagcacgtgaggtgttgcagagggaggacgatctgaatgaaattgtgcagcttgttggtaaagatgcgctggcagaatctgacaagattacgctggagacagcaaagcttttgagagaagattatttggcacaaaatgcattcaccccatatgataagttctgcccattctacaaatccgtttggatgatgcgcaacattattcacttcaacacattggcaaatcaggctgtggagcgggcagctggtactgacggccataagataacatacagtgtcataaagcatcggttgggggatctattttatcgcctagtatcccaaaagttcgaggatcctgcagaaggcgaagaagctttggtcggcaagtttaagaaactgtacgacgaccttaccactgggttccgcaacctagaagatgaggcacggtgaactgctgtagattttgtgtaagacaataatggctgccaaatggtttataaggtacggaagttgtagattgagaccatgtatgagaattttccccaccgctactcatttctttgccaccactattttagtcatcagtgctggatgggcaccctgtttatttcgacgtaccctttattgctagcattgtaataagcgatgggcatgcttgtagttgaataagtacaatgtccatgtattcaaacatcagcgtcatgtttatttgtttgttgaaaaaactatgttgcctttttggaaaaaaaaaaaaaaaaaaaaaaaaaaaaaaaaaaaaaaaaaaaaaaaaaaaaaaaaaaaaaaaaaaaaaaaaaaacccccnccttggggctttttgttttgcccccaattgggtggggggctttataaaacggagaaagggaaacacccttggcccgtttacttggggaacccaagggaattcccccttgcggaaccttgttgaaatgggaaggggtttgttaaccccaaatttaccggggccgatgcccgaaacccctcttgatatcccccgccgggggagcccggacttccccagggaaagggaggttttgggggggaac

SEQ ID NO: 239 - DNA, 735 bp, Zea mays
cgtgccttttgttgtgatggctggaatgacatttttcctgatgcagtcttgcaaagtttggcggctggggtctctgatcattgtccgctcctgcttggtttgaatgtggccaacaagggtaaacgcagattccattttgagagcttctggttgaaggttcccgagttggagggtcgttggttgcagctgatgggagtagtgctgaggctgctgctgctgcatgttcacctgaagaaagtttctcgagtcaacaaaaggggccatgtgatcgtactcgctcgtcgacggcactccaatcatgttcatcgctggctgccccgtttcattattctcggcgatcttgctcctcaggtacatgttgtcagtctgcagatccatctcccttctttgcatatattcaacttcagcatacaagagctcattctttctagctctaatcttgtttatggccttctccagcttgccctccatctgcttaagctccctgaggcccatggtgtggattgaatctcccactatggtcctactgtttgcgttttgcaagctatcgatcgcctggcgcagcttggaggactcctgctggtagtgctgcaagttaaagtatggatatatatatagtcagtcatcaaataaagcttcttctgcttgttgtgatgaataactgaccttatgctgatttttagagtatacataatcatgcccataaaaagcaagtataaagagagagcactgcag

SEQ ID NO: 240 - DNA, 868 bp, Zea mays
ctgcagatcatgaggtttgccgtcgtccatccctaagcaacgggcgcggcatcggcgcatactgtagcgaaacctgcaagaaggtgtctgctcggttatcagacatggtaggcgtaacaaaccacaccgaagatggtttctcatgggctctgctgaagatccagaaagacgaggccgtcagttcacaggacactgctgctgttcttgaatgcaacgtgaagcttgcggtggcgcttggcgtgctgaacgagtgcttcaacccggccaaggatcgccgaactaagatcgatatgctccaccaagctgtctacagcctcggatcagaattcaaacgggtgagctacgaaggattctacaccatggttctggacaaggatggggaaaccattgcagcagccctgctgaggatccatggcacaaaggtcgccgagatgccgttcgctgccacgctgccagcttaccggaaacaagggatgatgcgtcggctggtgaacgctgtcgagcaggtaggaggagcacgacactgtgtgagtgtgaagcaggtgctggcgtcagtgcaagtggacaagctggtgataccggccatagctgctctggtggacacctggacgaggtccttctccttcaggcccctgctggaccccgagtcgagggaggaaatcaggaggcggagtctggtggtcatcgccggcaccaccctgctccacaaacccgtggccgccgcgcggccgccgtcgccacacagacacgctgaagcagcggcgccgaagaatgcagggctgccgtggtggtggaagtacacgcagcaggcgccgccgctcacggacgacgagcgggccttcctggacacggcgccgctcgcctgcag

SEQ ID NO: 241 - DNA, 1584 bp, Zea mays
ctgcaggctggaaaaaggcatgctttatatttccaaacatgatgtccacacgctcatcagaccttgaagtagaatatctgaaaccattgaaatgagcctcaagatttcctgtgagcttcctcccacgaccaccaaatgcaggtcgtatccacacatcagaaagcctcatcatcttcattctgttgcttccaatctgaagtttctcctgggtaacaagagttgccctttcagctctctctgactcccttgatgccacttgcctcctcaatgttttgatctgctgaacaacttcactgctatgccgtggatcttttgagcggaatgtaatttctttcagatagatagcaccttgagaattaaacttgctatcatttgagaatggcatgccaggcacattgaagaagatacggatagtgcatgtgcggttgtcctggtgactggtcacactcttgacagtagaaacatggaaaggaaccatactaccataaataggtaagaggacagcttcattcttctgatctacttggatcaccaaatctcttacaaatggtacatcattaacattcttatatgcaacaagctcatttgaagccctcgcaggaccacgtccgtcaccagatccagtaccaaccccagcaagccttctagcagtctcttcattcttctggcgagcaagttcagcctggtgctgtctcctgagctcttccttcgacatctcctggttgtctgacctgagagttgccttggttggcataacatctatgtctttcgactttatcttaacctcagcagcaacagcatcatcatcttcgttgaacgaataagcaacatctttgaatgcctggagcagggtgctgttaagacctcatgtcctctttcattgactaaaactgtatcagctaataatagtgaaaactgcttcgtcttttcactggttgtttctgcctggatgttatgcaaaccaagggatacattaaaaaccattcccttttttatcctgcgatcattcttggcattcagatttaagccagattctcggaattcaaggcctattccagttccagctgactttgttagattaggaagaagttcaggtgcatccctctcaatcacagccactgcagcttgataaactgcactcatctgattgcctggtttcacttgttgaatagcagcttcatgagctttcctaagggtctcatatgctttattctgtgtaggggtagcgtcgataagatatgtccgagcaacatttgagcaatagctactgtatttggaaccaattgcacagatgataatacttgctgaatcataatacaggtactcgtcattgctagacgcaccaggctttagatcaaacttacccccactttgaaagactggagggtagcatatatcaacattatcaggcttcaatttcaccttgacctttagtgggtccagaatagccttctctgcgtcatccatcaacgatgagtgtgagacttccttctcctcatcgataaccttctccaacttaggaatcacaaaatttctcccggcctcgaaagtcccaatagcagccttcttacacatgtgatctct

SEQ ID NO: 242 - DNA, 2577 bp, Zea mays
gcggtatcctgtatgtcgacctgcaggtcggcccatcagcccacgacgcggcagcgcctgtgtctcatactctcaagtctcatctcatcaaggtcacggttccaccgttccagccgcgcgggtcccggccggagccggacgcgccgagccgccgacgggcgtccccatcacccccatgccgttgccgctgcgggtgccggcgcggctgctgctcgcgcggcacaagactaccgcggtgcagcacgtggcggcgcggcacctggaccacgccttcgagcggctcgcggcggcgcacctgcccctcgtcgcggcgtcaccgctggtcgacgcgctgcgggcctcccccgagccgctcgcgctgccgaacctggcgcgccgcctcccgctccgcctccaccgccgcggcccgctccacttcctccgcctcttcccgcgcgtgttcgacctccgcgccccgctcccgctctccctgtccctgacccccgccgccgcgggcctcctcgcagtcgccagctcccccgccgacgcagcgcggacgctccaccgcctcctagcgatgtcggtcacccgctccctgcccctccgcgccgtcttccgcgtctggcgcgagctcgccctccccgacgacttcgaggactccgtcgtcgaggggcacccacacctcttccgcctcgtctccaatcccgccgagcccaacactcacatcctccacctcgtcgccgaccaggcgaccgaggacttcaccccggcggtggagaaggcccgcccggacaggtacgccttcaaactgcagtttccgccggggttcaggctggccaaggaatatcggaagaaggtgaaggagtggcagctgctgccttacaccggaccgtatcaggtcgtcagtccgagcgctggaggtagcaagagggtgtcgaagttggcgaggaggaagatggagaagagggcagtagggattgcgcacgagttcctgagcctgaccgtggagaagatggtggaggtggagaagttcagtcagttcaggaagtggtttgggatcgaggtcaatgtccgggacgtgttcttggatcatcccgggatattctacctctcggcgaaagggaagcggcacacggtgtttctgagggagatgtatgatcgtggaaagcttctcgagtcgaatgatgtctctgaggcaagagccaaactcgttgagctcatgctccttcgtcggcgtggtctcgggaatgccaattcaagtgccaacatggcttcaggtgccactgctgatgccagagagagtggtgatgattttgttgatcatgaggattgtttgttggatgtatcagagaagtgatggtagaaggatgttgtcaacttcatgggaactcatgtcagtaagccatgttgaacggtgcttagcgcacttctgatggagaatggattaatggtaccacggacaggaggtttgtgtgctggagataaccaaatgagaaggtgcatggatttccagagtggtatgacttggtcgacaaagctagaggccatggatatgcttggaactcaaaagtcatgtttcaactgtgcgctaccatgttggtaggtcgagattcatgaggaaatgttgaacctttgaatttcggtccccttcagttctctgctcagattctttttcctgacaaatcattctgccaaggttgcttcattccatttgatttgtcaggattcatgagtttgctctacttcttcactttgatctggcagatgtactttttggttgtggcaatcgcctgaagtacaaccactggttggtgtcattgcctgaatcttattatttgaacaaagcattgcctgaattgaagagccaggcatcattcttcagcaatttttgcaacccgggtcgtttttgcaacattcttaggttcaacagaccagcaagatgtgcaaacatgcttcatgttgttggaccacttcaggcacctacatcgctagttcagcttttgagttccttattcgtacgatataactttatcctttcaacaattacgcctactctgatgtggggacattgagcacctatgaatcttaaggttttctgctggttgtcatcacaaaactagttcctgatgttcaaatatcaagaagagatggtggttgaatagccctatatgttggctaatggagagacagtccggcaccttgtgataggcagataggggtggagtaatggtactgcattgttgctagctgtttctctatatctaacaattttgtggcaaggaaacttaccagccagtctgtgtgctgaagattggtggttaccgtctgcctcgctgcagctgtatcttcaattcttcatacacattacttctgctgtcttttcttgcctggagttggttctgactcttcgctttggagggcaaaatgctagtattataattcagaaccattgttgcgataatttaaaattactttaggttattccagttatcagcctattattgttggagattggctgttaaactatgcctaaaatttgaaatggggagagaaccaagttttgttcaaaaaaaaaaaaaaaaaaaaaaaaaaaaaaaa

SEQ ID NO: 243 - DNA, 794 bp, Zea mays
ccgggttatggagaggcagaaaggatgctaaaggaggtcactgtatggtagcctgggaaaaggtttgtaggcctctacatatgggaggcctcgggatttctaacctgactaagctttgttgggctctcagaatgaggtggttgtggctgcaaaaaactgattcttcgaggccatgggtggacctacccattcaggtcccaagtattgccaggtccttcttctctgcagtattgatgtcagaggttggcaatggtgcgaatactcttttttgggtggataaatggattaatgggaaaaaggtagctgatatagcaccaagattgttctgcaccatatcaaaaagaattgccaataaaagaacagttcaagaggcaatggacaataggagatggattagtgatattaggggcgctctctcagcaggggccttgattgattttctgcatctctgggaagctttaacggattttcagctgcatcctgatattgaagacagacacatttttaccatagcgccagatggtaactactcagcaaaagttgcttatgaagggctcttccagggatcgtgctcctttcttcaccacaaaagaatctggaaatcctggatgccacccaagtgccatttcttcctgtggctggtggcacatgataaatgctggactgctgataggctgcagaaaagaggcatgaaccatccggctaggtgccctctttgtgatcaagaacctgaaagcattaatcacctgctgggttcctgtgtgttctcaagagttttctggtataggcttttg

SEQ ID NO: 244 - DNA, 788 bp, Zea mays
ccggccgggcacccaaactccgctctcatcccaccccccctccactccactaccacggcggcacggcctgcctctgcagctctgccctgctccgcacccctcgctctccaaccccaacgcgcggcgttgctaaaattcaccgcagcgcttactccagtttggccacctcaccacccgccgccgctgtttaagaaggccccgcgcccgatcggggatcacgaaccttggccgccgctgccggagtgggggtaagcgagagccctcctgcttggggtgcgttcttcgtaggctgcttggttctcttcgagcccgatttgctctttgtagcctggctctttccgagcgcagtctgttcttcgtctcgtctcctctgctggaggtttgcaggatctggtatgatatggtgatgtatgatgaactgacgacgcacgctgctgtcgcgtgcgtggtgtgtgtctgtgcaggcgtagatttccggcggccatggggggcgccgtgatggtcgccatcgcggcctctatcggcaacttgctgcagggctgggacaatgcgacaattgctggagccgtcctgtacataaagaaggaattcaacctgcagagcgagcctctgatcgagggcctcatcgtcgccatgtccctcattggggcaacagtcatcacgacgttctccggggcagcggccgactgcgttggtaggaggcccatgctggtcgcctcggctgtcctctacttcgtcagtgggctggtgatgctttgggcgccaagtgtgtacatcttgctcctcgc

SEQ ID NO: 245 - DNA, 2830 bp, Zea mays
cattgggtacctcgaggccggccgggatccctcgaaggaacaaccccaggacgccttggcatcccccctgcttcgacacttcgacaaacattgtgttagccgatgtcactctgcttttagccttttgccaagtgccaacaaccaggtcgaaaggacatctgaccggcagcaggcagacatccgtcgtccgccatggagtcctcatggctcctcctgctctcgtgccttccggccgtatgggtgcttgccgcggcggcggggcggagtcccggctgcgcgacgaggtgcggcgagatcgacgtcccgtacccgttcggcctggacccgcagtgcgcgatccacgccggcttttggctcaactgcaccaccgtggatggcgccaccaagctgctcgacaagaactcggaggtgaccaagatctccgtggaggatggcaaggcctggttcaagaacttcatctcccggcagtgctacaaccaatcctcgggtgacatgttcgaaaacaacgcgtgggtcgactataccggcgagccctacgttctgtcggcagaggataataagatcatcgtcctcgggtgcaatagtatggcctacatgcagagcgactcttacataatcggctgcatgtcgacatgcgacgacccactgaagaacggctcatgctccggcaccgctggctgctgccaggcggagctcccgccgggcgtccagttttaccaaggcttcttcaactcgctgcacaacaccaccaagatatggaagcaaacaccctgcaactacatcaccgtgatggagagtgcggccttcagcttcagctccacctacctcaactcgacggtgttgtacgactccgacgacgggaggacgccggtcgtgatggagtggggaatcacacggcagacgtgcgaagaagccaaagccaacaagactgcgtacgcgtgtgtcagcaaccatagcgactgcgtctacagcgatgccgccggctaccgctgcaggtgctccggcggattcaaaggcaacccgtacgtcgtagatggatgcgcaggttcgttcctcttgcgcgcccagacatccaaatccatgcatgcacaagttacaaaccgatgcgattttttcgtgcggttttcagatattgacgagtgcttggacagtgctacctacccctgcgctgggatatgcaaaaacacactcgggaatttcacatgttcgtgcccacgaggaagaagcatgatcaatggcgtttgcgtgaaaagtcagaggtcaacttggatggtgccggttgttggtaggtcgctgcacaagttgcgtacttgcgttaggaaaattccctgccgggagcatctgttttttttccctacactttttcaatgctttccgggtgtttacagaaggagtaataagtaaccttcgttaggaaaatcgtgatgcattgcaggcgcaagtgttgggctggtgactctcgtgatcggcgttacctgcgcatacctggtccgagaacggcgaaagctgcaccgcgtcaagcagagctacttccggcggcacggcggcctgctcctgttcgaggaactgaagtcgcagcaccaccagcagggcgccgccgcgttcacgatcttctccgaggaagagctgcagcaggccacggacaggttcgacgcgcagcgggtccttggccacgggggccacgggaccgtgtacaagggagtgctgaagagcggcaccgccaccgagatagccgtgaagagatgcatgaccatcgacgagcagcagaagaaagagttcggcaaggagatgctcatcctgtcccaggtcaaccacaggaacatcgtgaagctcctcggctgctgcctcgaggtggaagtccccattctcgtctacgagttcgtcccgaacggcacgctgttcgacctcatccacggcgaccacggtcagcgcgtctcgctggacacccgcctcaggatcgcctacgagtccgccgaggcgctggcctacctccactcctgcgcgtccccgccgattctccacggcgacgtcaagtccaccaacatcctcctagacggcgactacgcggccaaggtctccgacttcggcgcctccattctggcgccgaacgacaagtcgcagttcgtcacggttgtgcaaggcacgtgcgggtaccttgacccggagtacatgcagacgtacgagttgacggacaagagcgatgtgtacagctttggggtcgttctcctggagctgctcacgggcaagaaggcgttcgacctccaagggtctgagcaggacaggagtctctccatgaggttcttgtacgcgatgaaggagaacaggcttgaggacatcctagacgatcagatcaagaacagtgagagcatcgagtaccttgaggagatcgcagagctggcgagacagtgcttagagatgagtggtgtgaataggccgacgatgaaggaggttgcagataagcttggtaggttgaggaagatcatgaagcatccatgggcacatgaggatcctgaagaattggacaggttgcttggagagccgtctactacaactaactcgaccgctactactgggaatttcatcattgcaattggagagccgtctacagccaactccaccgctaacactgggaatttcagcattacaaagagagctgccatgggcttggaatcaggacgttagctactgtaaatgaaattatatttacctcattccatatgtatataacagatagagactgtacattttcttggcggtacaattccagttttacattaccaacatgaataaaacaaagacgcaaagctttctctgagaaaaaaaaaaaaaa

SEQ ID NO: 246 - DNA, 1143 bp, Zea mays
ttcggtcctgccccagcagccacaactacgacagcgccgtggacaagctggacaatacacagtggtacgttgtgtggaacaaggatatgaacacgaggatccttcccgaatacgtggtcagcttcaagtgctccaagctgcagctgacgcaagaattatcagaagcgacctcaaagctgaagaagccgtcacgagtggctcgcgacatgttcccgacgcttcttgcagagatcgagaagatcgtgccagacaagtgcgatctgttgcaggagtcatacagcagattcaagatgggtcggattaagaaagaccagttcatccgattcctccgcaattacgtcggagacaaagtgctgaccaccgtggccaagaaactacgaggatgctaaatttctagtgcgcgtgtctccttggtttcgccgtcttggtggtggcctacgtggtggctctgactacagcgattcaagcttgtctacgtgctagatgtctgcagtagtaccaaatagagatgaggagctttacttttgtttctgtttattcaagtttctgccaagggcgtatgcgtataaaggttttgcagcgatgcagaaacttgaataaacagaaaggataggtgcagtttctgatcatgagacgtttcagttcttctgtgtcctgcagcctgtggatataatctgtgcagactgaaatgatttgatgaaaccattgttgaaccgcccaatcgcttcaaagttttgccgttcagagtgagcttgtttgggcttgtcagggagaagaatattctctccctttcttgttttttctaagtttaacttctctatatctctgaatattgacaattctaatattcagtcagcataagaaaatctagtgaatctcaccaggcatgtactctcaggcaaggttcacagtttcgttttgggtcaaccgattttttgttttgttgaccaaaatttaacttttgtattttatattttgaattgaaatctatttgaaactggaccgaaattcgtttttcgcttagtagcgaaaacgaaaacacacaccagttttcggtgaaaaaaaaaaaaaaaaaaaaaagggcggcggccgacgagagtacatcgtcgacccagaaattaattcacggagcggcgccgcagg

SEQ ID NO: 247 - DNA, 1599 bp, Zea mays
ctaaaaccccctctgctccgaagcgcgcgcgccactgcactcgcacccggcaccccacgcacgcggacgcgttccatcccctacccgccgcctgtagacgcctcgtcctctcgcccaccggcgaaaaaccgttcccctctgccgtttccgggtctcttagtgcagagcacggagacctttctacgcgcctccgagccagcccgcctccctttcggatccgcggaacgacgcacgcggacgcctccttgttccgggtcctactcccgccgcctagaggcctcgccctcccccctccggcgaaaaccgattctctccggcgtttcctggtcccttagtgcaagcaaggacaccgctcctctagcgagctccgttctgaagcggcaagaaagatgattaatcttttcaaaataaagggtcaaaagaaagaggaggcagcaagtgctgctggaaaggcccctgttaagaaacagtctgctggggagctccgtcttcataaagatattagtgagctcaacctgccgaagaccacgtcaatttcttttcccaatggcaaggatgatctgatgaattttgagaccaccatccgacctgatgaaggatattacatgggaggcactttcgttttcacctttcaagtgtcctcatcttatcctcatgatcctccgaaggtcaaatgcaagaccaaggtgtaccatccaaatattgatctggaaggcaatgtatgtctgaacattctgcgcgaagattggaagcctgttctcaacatcaacactgttatttatggcctgaatcttctttttacgcaaccaaacgacgaggatcctctgaaccacgaagctgcagttgtccttcgtgacaatccaaagatgtttgaggcaaatgtgagaagagccatggctggaggctacgtcggccaacactatttccaaagatgtgcttgacttgatgtggtggtggcttgaaaacgatcaacagagcccctccccctgtatcagcaccagcgcgcccagctttgtgtgcggaaagtacttctggaagcaaaatccaaaccgttcatggtgtgatactgtgatgcatctgtttgcccgcctttgtgatgtgtggtatagtggtggtgcataatgacatggaaatgcttctctaactgtatcattcattccataaatcctaaacgaggaatgggaagtggattgttaagcagattaatactgcagacattaagatgaggaagctggcaagcaggcagggagaaccatggcttactggcagacaataggataagactatgccctcctctaattgatcaaaacccttagatttattcctctttttagtttctggatacaactttgatgccatgtcacacggcccatgaaagtgtaacagctagttgcatccttttcccataaaagtgtaagggcatgtacaacctagaacccacttcacggttctccaagcgcaagacacacctaagacagtttcatacagtgggttgtatcttagattaaatgctttaataaatgcattgtatttacgtgtaaaaaaaaaaaaaaaatctagtgtgcatatacacttaggtgccgtttggtttccaaatgt

SEQ ID NO: 248 - DNA, 2639 bp, Zea mays
cacagctgcacgggtatcatatcggtagtctagtaatataataaaccgctgaagcttggttgtgcagaaggttgcattgcactggggggagcgtgcgcggtaggagtggatcggaggagcatgtggaggttaaagattggagagggaggagggccatggatgcagacggcgagcggcttccatggccggcaggtttgggagtacgacccggacgccggcaccgacgaggagcgcagcaaggtggagcagcttcgccgggcgttcacagagaaccgcttccgaagcgggggaatcgcaggacctcctaatgcgtatgcagttaactggacaaaaacatctgcatgcggatctgcctgcggccaccaagatagaggaggatggcgacgaggtgccgctgacggaggagaggttgagggagtcgctgaggcgagcgctgggttgcatggctgctctccaagctgaagatggccactggccgcctggtgattacagtggggttatgtacctcatgccgttctggattttcgcactgcacatcacaggcacggtcgatgctgtcctatcgaaagagcatagacgtgagatctgccgccatatctacaaccatcagaacgaggacggcggatggggcttcaatgtcatagacgagagcgccatgttttcgacgtgcttaaactacaccagcttgagacttctagatgaggtgcagcgggaggagaacgatgggctagctaaaggtcgagcatggatcctatcccatggaactgcaactgcagcaccgcactgggcaaagatactactctcggttattggtgtatatgactggcgtggcaataatccagttgtgcctgaactatggctggttccacgtttcctcccaattcacccagggcggttctggtgcttcaccaggattatgtacatgtcaatagcttttctttatggcaaaaaatttgttggtcccattacaccaactatattagcactaagggaagaactctacagtttgccttatgttcacattgattggagcaaagctcgtaattcttgtgccaaggtttgccatcgatcttcattaactcttaattattattttatagctatacatgcttgaacatgttcgtggagcctgtgttgaactattggccacttaacaagttaagagagagagctttgaaccacattctggaacatatccactacgaagatgaaactactcaatatattggcatatctcccgttacaaaggcactaaacatgatttgttgctgggttgaaaacccaaattcagatgcgctcaagcgacatattccaaggatacatgattatttgtggattgctgaagatggaatgaacaccaaaatatacgatggtacccacaactgggagttagcacttataatccaggccatgttatcagcagatgctgccaatgagtatggtccaaccattcagagggctatggaatacttaaagagagcacaagttactacaaaccctccagggaacccaagttactggttccggcataggtcaaaaggatcatggccactttccactatagacaatggctggggctcatcggatactagtgcggaagcaactaaggcacttttgatgatttccaaggtatatcccaacctcgttgaaaattcaaatggagatgagtggatgttgaatgctgttgattgccttctttcatttatgaacaaagatggttcagtttctacatttgaatgtcaaagaacttattcttggctagagattctgaatcctttggagagttttcgaaatattgtcgctgattacccgacggttgaatgtacatcctcggtgttgcaggcattggtattatttgaggaattcaattcagagtaccgcagtaaagaaataaaagaaaatgttaagaaagctgccatatatattgagaataatcaaaacaaggatggatcctggtacggcacatggggaatatgttttgtctatgggactctctatgcaataaaaggcttagttgctgctgggagaaattatgagaacagtatttgcattaggaaagcatgtaactttttgctctcaatacaactcaaaactggtggctgggcagagagctatcattcctgtgaaagacaggtttatgtagagggtcatagcactcatgttgtacaaactgcttgggcgatgctagctttgatttatactggacagatggaacgggacccaacaccattacatcgagcagcaaaagtattgattaatatgcaactggagacaggagactatgctcaacaagaacatgttggtagcaccaactgctctgtatacttcaactaccccaactatcgtattttgttccctgtttgggctcttggagagtatcatcgcaaagtatgtaccaaaagtaattgaaaggaacccatggaatgcaaaaatgtcatatgtagtactatgttacatactaaaggaaaatcatagcggagtcgatataaccaattgtactttatataatgaaatgtaaatgggtagccacatacatgatttcaatggaccatgtagtgatgtctaacatttgattatgatgtatgtacactagtatgaatacgccaaatcgcaaataagtaacaattcagtttatgtgt

SEQ ID NO: 249 - DNA, 649 bp, Zea mays
gatatattctcttctccttcttcttcttgtcctcctccttcgtcttctccatcttcctgtccttcgatccatcaaaagctggccgcggccgagacgacgtgcatagctataaataatagcccatagcatcctcaacaaccagacaagaagtaccacgccgccggttgtttgtttgtttcttccatggagagcacggagctgaaagtggagatggtggcgttgcatgagaagcgggtacgcagatgcctgtccaaagtgaaagggatcgagcgggtggaggtggaggcgagcctgcagaaggtggtggtgacggggtgcgtgaaccggagcaagatcctcaaggcgctccgccgggtggggctgcgcgccgagccgtggtcaccgcacaacgagctgctcagcgcctacgccgccaccaccaccctcgtcttcaacaactcctacgccttcttctgatcaagtcatctcatcctttatagctagatagctattgtaatctctctctctctctgcgtgcttggcttgcttggagtttgttgggaacgtgaacgacggacggcgttccacatgtacacaacatggatggcattttaatctctctctcccttctttcttcttgaaaaaaaaaaaaaaaaaggcccctagggcc

SEQ ID NO: 250 - DNA, 1732 bp, Zea mays
caacggcgctccaactgcactactgcagccaggctttttgcttgcttccgcgggctccgcgtccgcgtgcgataggctcaatatcctcgccagcggatcccctccttgcgaggccggaactgagctgccgccggcgctatggtgagcggcggcctggcggctgcgtcggaagtcgccgtcgttttcctcatccgccctgtccttgccatcgccttcgtcttcaccctcatcctcctcagctggtacgtggcgtggaggacggtgctggtgcacgtgccgctggtgcaggagatcgccggcctgcgcccgaaaaagccctctaaacccaagccagccaaccgcggccgcttcgccaagttctaccagaaccaggccgaagccgcacaaaggtcaaagctttacctccgcacgaccacacaagccttcttctccttttgctcatccggatgtttcggtgctgattcatgtgggaaactgactgtccagcacttgttcaattcgatccagattgactgtttcagtgctgttcagtcctggactcctggcattgctgaagcagtttgttgcagttaggttgtagcttaggattgtaacctcataccgcatgtccacctactatctgatctggttgggcatatggtgaattggtgatgctgcagctcttcacgttgcgtgcttgccattttagttaaattgaagcggcgaaagttgcttaaactgcctatttcagcattacaaacttgatttgtccttatttgcagtttggtacaatgcatgaaggacctgaaagcataggccccgtttgtttcatcttttttgcttattctggccactattggtgctaaagtaaaactgtttgttgaaatttaaagaaaagccaagacatttcaaacttcagtccgtagactggagctataactatgtcacgaaaacacaagttttttttacaccttgtatcgtgaatacctgcagtcctattctctcagaagctgtattttgctattgaattatttaggcatagctgggaacgctggatgcctgtatagggatggtagaaaaataaaatcactatcatttgcaggatcaatgttgtttatctagtaaaaaaatgagttatgattgaaatagcttatgtagccattcttatttgaaccactagttttgcacctcatatattgtacatcatgagcatgtattctggaaaagatggttaactgtaaactcttatgatttgatttatcttgctgtatccttataccttgaagttttcatagtttattaatcttgatctgcaatgccaatattagcattactacaagaaagtaggtggcaccctttggttcatcattcagtttcagttgctccttaatgccattccttcctttcagtgatgggcaagtacacagaacctaaggatgaaagaacattgctatgtggtaccgaatccgttgcttgtaggctacggtagctgttttagtagcctgctgcagcagtggttgggagcgtctccagcttggctaggagaattgtttgatgctttctagaagactagaaccttttgattacccagaggaacagcaaatcagaaggggcatcatcttaagagaaagcagtcaccgccttgtaatgagtacctgccgcagactttgttatgcagttctaattagaatgcaagtactaccagtgacggcgtctttttaggagagaatgtatatcagcatgtgatgggagc

SEQ ID NO: 251 - DNA, 457 bp, Zea mays
cccatcatttcttcagtgctcatgacctagagaaaattcaagaaacagcgaggaatctcatggacgagcacagcaaagataccatagtcttagttactgagaaggattatgaccgtgatccagaggccctcaagacactggacgcaaacgtttgggtgctgtcttcttcactgcagattatgcatcacagcaaacaaggagaagatgaattcatgaggaaagtcaatgagattatcacagttacctggtgtgcgaagtcacatgcagcggaccgggccacgggttgctgatggtgtgtggtttgatatggttgtacctgaaaacaactgatagtgaaacattttttgcctggagatatgaacattagcatgcgggttatagtttttccttgcaaccgagtcagtgtcccagtcaaacttacaagatttaaacatgagcaagtaacccgacagcaacg

SEQ ID NO: 252 - DNA, 475 bp, Zea mays
cagacgggacccttgcttgctcgcatgggatcttgcgtttccggagtcccccgacgacccaacgacctctcactttcttctttccttttacgagaagcgaccagcaaggcagcgacctggggttgaccaatagcatgaaggggcgatggggcggtggcagccttggcagcaggtggcggcagcgacgcggcgtttccttgccggccgcggggctctcgctgcttggatcgctgtgcggtcgtggtggcgcactcggctcggccggctcccccaccccccatgcctgccggccggccggcgagcgacgggtcgtcgcaaagccagcgcgcttttcccacccaaattctcccatccatgcagtacgcgacagagcggctgtgctgagtgctgctgcgccgcctctgttttttccggcagctttgccgtcgaccattccgctttgtgccctcgctctgctgctgcctttcctcagttt

SEQ ID NO: 253 - DNA, 772 bp, Zea mays
  misc_feature (769)..(769): n is a, c, g, or t
tgcagttgagatgcttgatgatgaagtctacgttggggcggagaatagctataacctattcacggtgcgcaagaacagcgatgcggcgacagatgacgaaagggccaggcttgaggtggtgggagagtaccaccttggggagtttgtgaacagattccgccacggttcactggtgatgcgccttccagactcggatatagggcagatccctacggtcatctttggcacaataaacggggtgattggcattattgcctccctcccgcacgaccaatacatcttcctggagaagctccagtcgacccttgtgaagtacataaagggcgtcggaaacctgagccacgagcaatggcggtccttccataacgacaagaagacggcggaggctcggaacttccttgacggtgacctgatcgagtctttccttgaccttagccggagcaagatggaggaggtgtccaaggcgatgggcgtccccgtggaggagctgtccaagagggtggaagagctaacgaggcttcactagtgtagatggaacatggaagcgttgcttgtaagcaagtagtaacttgttccctgagctgtagcctccgcggctcgcacgatcaaagtgttcggccgtggctgcagtctatccctatgctatcctatcgtgatttgtttgtttgagctgtgccagtttcttttctttattattaatgcttaatgttaaaattaaaaaaaaaaaaaaaaaaaaaaaaaaaaaaaaaaaaaaaaaaaaaaaaaaaanaag

SEQ ID NO: 254 - DNA, 1333 bp, Zea mays
  misc_feature (54)..(54): n is a, c, g, or t
  misc_feature (56)..(56): n is a, c, g, or t
  misc_feature (60)..(60): n is a, c, g, or t
  misc_feature (80)..(80): n is a, c, g, or t
  misc_feature (115)..(115): n is a, c, g, or t
acgaggaccggacgacgatgcgggggcggggctcctcgggcgcgcgcatgagcnangggnacgcggcggaggcggcagtnggcgcggtcgggtgcggctacgacctgacgggggncctccgcctgggccgcgccaagcctggtggccggctcgtggacctcgacggcgccgggaagtgggcggggacgtccccgtcgccgcgggagctggcgttccccggcggggccgccgtggcgggcgtgccggccggggtcgtcgccggcaagggcgagcgcgcgcggttccgctccgacgtgctccccttcgcgcagatggcggaggaggtgaaccgctcgctgtcgctgcccgccagcaagatcccctcgggcgccttcaacgccatgttcgactaccgcgggtgctggcaccgcgacgccgccgccacgcgcagcctcgtgcttcgacgcccgcctcgtcgagctctacagcgtcgaggccgtgcgcgccagcctcgccctcagggaccacgtcaggcgggacctcccgcccgtctgggaccccgccgcgctcgccgagttcatcgacaagtacgggactcacgtcatcgtcggggtgaagatgggaggcaaggacgtggtgtgcgtgaagcagctcaagggctccagcctcacgcagagcgacgtgcaggcccggctcaaggagctcgccgacgacaggttctcggaggattccacagcaagttccaattcttccaccgcgggaggcggcaggttgtcgcaggggctaaacgttgggcccggatcggccgcctggcagtccttcagatcacccgtcgtgtctcacaaggattcgcaggacatggtgtgcattcacgtcaggagaggcggcgtcgacagcgggcagggccacggcaagtggctctccaccatcaccggcttcccggacgtcatctccatgtcgttcgtgcccataacgagcctgctcaccggcgtccggggcagcggcttcctcaaccacgctgtgaacctctacctcagatacaagccgcccatagaggagctgcagcagtttctcgagttccaggtgcctcggctctgggctccagagttcggtcagctcccgctctcgctccagaggcggaagaacatcctgccgtctctccagttcaccctcatgggccctaaacttcacgtcaacactgccaaggtcgactcctgcctccgcccggtgaccggcatccggctgttcctggaaggcaagaagagcgaccagctgggcgtccacctgcagcacctgtcggcgacgcccagcgcgatcacggtgctcaagcgaggccgcgtcctcggcggacgac

SEQ ID NO: 255 - DNA, 1847 bp, Zea mays
attaatcagaagatcatataaacatctgactgttaagttttggcgttttttaccaggaaaactgtgatgctcttgttaccgtcgttagatttctatcactcgttcgtaacttccatcaagaaagaaagatttcttacactttggttctctgcatttatttgttgttgttgtcatcgcgtacaggtgcgtacattggcgtgaacattggcacggccatgtcgtcggtgccagcgccgacgcagatcaccacgctgctccggtcgcagaacatccgccacgtgcgtctctacgacgcggacccggcgatgctggcggcgctgtccaacaccggcatccgcgtcatcgtgtccgtgcccaacgagcagctgctggccatcggcaactcgaacgcgacggcggccaactgggtggcgcgcaacgtggccgcgcacttccccgccgtgaacatcacggccatcgccgtggggtccgaggtgctctcggcgcagccgagcgcggcgccgctgctcatgcccgccatgcgctacctccagaacgcgctggtggccgcggcgctggaccggtacatcaaggtctcgacgccgcactcgtcgtccatcatcctcgactcgttcccgccgtcccaggccttcttcaaccggtcgctggacggcgtgctggtgccgatgctcaggttcctgcagtccacggggtcgccgctcatgctcaacgtgtacccttactacgactacatgcgctccaacggcgtcatcccgctggactacgcgctgttccggccgctgccgcccaacaaggaggccgtggacgccaacaccctgctgcactacaccaacgtgttcgacgcggtggtggacgccgcctacttcgccatggcgtacctgaacgtcaccaacgtgccggtgatggtgacggagaccgggtggccgcacaagggcgactcctcctccgagcccgacgccacctctgacaacgccgacacgtacaacagcaacctcatccgccacgtgatgaacagcaccggcacgccgaagcaccccggggtggccgtgccgacctacgtctacgagctgtacgacgaggacacccgcccgggctccacgtcggagaagtactggggcctgttcgacatgaacggcgtccctgcctacaccctgcacctgacgggctccggcgtcctgctggccaacgacacgacgaaccagacctactgcgtggcgcgggagggcgcggaccccaagatgctgcaggcggcgctggactgggcgtgcggccccgggaaggtggactgctccgtgctgatgcagggccagccgtgctacgaccccggacaccgtggacgcgcacgccacgtacgccttcaacgcctactaccacggcatgggaatgggctccgggacgtgctacttcagcggcgtcgcggtggtcacgacgaccgacccgagtcacggatcttgtgtttatgctgggaagaacgggacgtcgttgatgaacggcacctccctggcgccgtcgtccaactccacggagggaggctccggcgcgcaccgggcgttcggcgacgtctcgtcactcgtccgcatcgtctccaccgcgctgctcttcagcgtcgtcctcctcctgttgtaggcagtagttagtactagaggtagaaggcaccctggaatccatgcagtctttgcagagttaggcattcgtgagggagggatgattctttttgctgtcaagtggcgggccgggaacgttctgatgatgtattctcccgtctggtattggtatggtatggaacaaaaattggtttgcatccccaaaaaaaaaaaaaagaaaaaaaaaaaaaaaaaaggccccta

SEQ ID NO: 256 - DNA, 1032 bp, Zea mays
tcacctcagcttggtcagcttccagctccgcctgtccaggggctcgctgctgccggtgacgtcttccaggtccgtggtctcctcgctgctcgcggcgaccaccgggacgatctccttggttgtccgccgctcaccactgaacctgagcatctcgaccacctcagccatggccggccggctctcggcgttgctctgcgtgcacagcatggcggcctcaaccacggcgcggagctgcagcaagtcgaagcgtccggcaaggcgcgggtccgcaaggcgctcccacttgcggcggtccaccagcggcgccgcccactgcacgatctcgcgcttgacgccgccggggagcttctcgagcgggcggcgcgcgctgacgagctccaggaggagcacgccgaagctgtagacgtcgcagctctcggagaccttcccccacatggcgtactccggcgccaggtagcccagcgtgcccttcacccgcgtcgtcaggtgcgacacgccgtcgggtatgagcttggcgaacccgaagtcggcgaccttggggacgaactccgcgtccagcagcacgttgctcgccttgatgtcccggtgtatgatgtgcgggttggcctcgtggtgcaggtaggcgaggccctcggcggcaccgatggctatggcaacgcggcgtgcccagtcgaggggctgatgctgctgggaggagggggcgccgcgctgggtgtggagatgcgtgagcaggctgtggttgggcatgtagtcatagacgatgaggcgctcgtcgccgccggcgtagaagccgcggaggctgagaaggttcttgtgccggacgcggccgaggatctccacctcgatggcgaactccatctccgccttggccgtcatcgccttcagtcgtttcaccgcgatctgaacaccgtaccgcacacatttgtcacgaatctcgacgcccttggaggtgcggccccagtagacggtgccgaatccgccctccccgagcttgttgctctcgttgaagttgttggtcgcctgcaggcagca

SEQ ID NO: 257 - DNA, 491 bp, Zea mays
  misc_feature (62)..(62): n is a, c, g, or t
  misc_feature (183)..(183): n is a, c, g, or t
aagctggagctccccgcggtggcggccgctctagaactagtggatcccccgggctgcagggnagctcactagtccccccccccccccccccctttttctgggactgaggagtacttgttatatatttcaaattttcaattagttttctatcttgagaaaacaaagattggtattttgcattgnggtaacaaaattctgatacatttagtgccttacagccatcaaactaagctaaatgattctcgtcctgcatttcaaatagttcttcagctactggatgccactagttttgtttgatcgaagttgatcgggcgtacccagtgccgtaggcttcccgcactgtgcggggtctggggaagagtatctttaagcgccaagccttacccgcataatatgcagaggctggggctcgaacccgggaccttccggttacagacggtaggctctaccgctgcaccaggcccgcccttcgatgggtcgggcaaccaggg

SEQ ID NO: 258 - DNA, 988 bp, Zea mays
actgtgatctcgtgagctaacctgtgtgactgtgcgtttcttccttcctcctaccctcccgtcctcacctcagactagctcggaatcctccgccgccgagcaaaggttccaccaaaagaccaaaccccaagtcctcgcaggatttgattctctgaccgattcagggacaccttcctcagagcaatacttaccagcgtgggcgtggctaccaaccgcagagtttccatgagcagatgcaaaccagtcggcggcgagagcccagcagcagacgggccgatgtcggagacgccgtgttccgtgcagcccggggtcctccctctcctcgggaagccatacttcacatgcattctctgcaagtctcatgtcaaccagccgttccaagtggtggtccccaagtcgctggcgccgttcctcccggggacgacggtgccggcgacggtgacgtggcacgggcggtcctgggagatgcggttcacgggggggcggcagatccagcgcctggaggccgggtggcggggcttcgcgctggacaacggactgaagctcggcgacgggtgcgtcttcgaggtggtggacggcagggcggagcgcgtggtgttcagggtgcaggtgctccgcgccgacatccccgcggagatccgggagcgggccggcgggtacactccgtccagccccatcctcatcgactagctagctcattgctcacctcatctcatcagctgctggtctgtatccccccgtgcggccgtctgccactgttactgcagagggtgagagtgcaatccgatttttttgcattttagtccttcctcggaaaaaattcacgtttgaaccctataaaaaaaaaaaaaaaactgaaactgaactgattcagctactgcagagtgaagtgcagcctaggcgtgttcaactggattgtggagtgggacatttctgaaacctatgtttagtagaaactcctgtatctgtcttcaaaaaaaaaaaaaaa

SEQ ID NO: 259 - DNA, 1328 bp, Zea mays
gccggccggccggccgggctcgtccgtttccgcatcggtgtatcttcgcccccggcgaaggcgctatcctcccgaccacccggcggtgccggtacgccggtaaggcaggttgccagaccccgcgaccccgatcccgatcggtcgctggcgaggcggcgtgacctaccccggctcatcctctcaagccagacggtctggctgctgtgcatccccgttttggcggctaccttacctctggcaaggcaatcccccctcacccctggcaagcacgggagaacatggagagtgcttcagatgtacaaatgcaacatcgtgctgaagattccgagactacaattgagatcaaaatcaagacattggattcccagacatacaatttgcgtgtgaataaatgtgtgccagttcctctgttgaaagagaaaattgctactgtaactggaatattgtctgaacagcaacgcttgatttgtcgtgggagagtcttgaaggatgatgaactcttgtctgcttatcatgtcgaagatggtcatacattacatcttgttgttagacatccaggccagtcagctacatttggaaatgcagcaaccgaagctaacacatcaaattctggccgtcgtcatgggcccacagtggcaagaagtgtagtacttgaggctgttaatgtggatcctgggagcagtgaactcccagcttttgttgcgcagattctccaaagtgtgcttggaacaatcaatgcacaatctacgggtacaccaacatcttctgacaccggatctttagatccttcacaatcttccatcccaaatactataagagttgaactcgaccagcaacaagctcctctgctttttcagtctgaacccgcacatgagtcatctcaaccaaatgtcatccctgatgctttgacaactatgtctcagtacattaactttatgagggactcatttaggagggagggctttagtcttaatggacaaacagagggtaatgtggaaaacagaactgcagagcctgaatcagcttctgtgcttgggcttcataatgcatcattgctagctgaaaatatgcactctactaggcaaattattgttgaacaggctggtgcattgctgtctgaagtctcaattctgaccgctttatttaacgtctttatttcaaaatcttgctggttccagttagctaatcttagtttatcttcttaccgctttatttaacgtcttctgttcattgctattgacttgatgatgtttgtgtgttacttgatctttgctgataggaaacctcatatatttctgacagtaaacatgtaaatttgcatttgctgc

SEQ ID NO: 260 - DNA, 301 bp, Zea mays
atggcccacgccgccgcggcagcgctcgcccttctcgtcttcttctgcgcgcaagcgcgggacgcggccgtccatgtcgtcgacgcggcggcgacgctgtcgcaggggcagtcgctgggcgccaccgacaagctggtgtcggccggaggcaccttcgagctggccttcttcacgccgacggggggcgacccgtcgcggcggtacctgggcgtcatgtacgcgcagtccaccgagcagaccgtgccgtgggtggccaaccgcgaacgcgcccgtcagcgcggcctccgcgtactcggcgacc

SEQ ID NO: 261 - DNA, 2230 bp, Zea mays
gtacgtaagctcggaattcggctatccggggccactaaacgcagatttcctcggttccttgtacgttcagggccggacgacggggacagacagcggtgtcgcgggggcacctgcttcccaacgccgtccgcacctgctgccctgtcgtccgccctccttcccttctcctcccctccaactgtttcctcaacctcccgacccaaccacggccgtgcccgccaaggcgccaaccgcacagcagcagctggggtgctgacgtgctgtgggtggttctgttgtccatggcgcggaagcatcagcatgttgccatatttaccacagcgtgcttgccgtggatgactgggactgcggtaaacccactgtttcgggctgcataccttgccaaggctggagattgggaggtcacgctggtggtgccttggctgtccaagggggatcaggagctcgtttatccaaacaagatgaggttcagtttgccggcagagcaggaaaactatgtgcggcggtggcttgaggaacggactgggctgttgccgaagtttgacataaagttctatcctgggaagttttcaactgagaaaagaagtattctacctgttggagacatcagtcagacaatatctgatgataaagcggatattgcagtgctagaagagccagaacatcttacttggtaccaccatggacggaggtggaaaagcaagttccaaaaagttataggtgttgttcatacaaactatttggaatacgtgaaaagagagaaaaatggatacattagtgcgtttatcttaaaacacattaattcttgggttacagacatctattgtcataaggttataagattgtctgcagcaactcaggatgttccaaggtctgtgatttgtaatgttcatggagttaaccccaaatttattgagattggcaaattgaaacatcagcagctatgccaaagagagcaagcattcttcaagggtgcatattatatcggaaagatggtatggagtaaaggttacacagagcttcttcagcttcttcataagcaccaaatggaattgtctggccttaaaatggagttgtatggcagtggggaagatgctgatgaagtaaaggcatcagctgagcgactgagcttagatattagagtctatccaggccgtgatcatggagattcaatattccacgactacaaggtcttcataaacccaagtacaactgatgtggtatgcacaacaactgcagaagctttggcaatggggaagattgtgatctgtgcaaaccatccttcaaatgtttttttcaaaagatttcctaattgtcacatgtacaatactgatgaagagtttgtgagactaacaatgaaagctttggcagaagaacctatcccactgtcagatgatttgcggcatgaactttcctgggaggcagcaacagaaagatttattagggttgctgatattgcaccaactgtgcctgtgggacaaccaccaccctcctcgcagcatttcatgcgcatctccccagatgaactgcagaagaacatggaagaggcatctgcatttttccataatacaatctctgggtttgaagctgtgcgttgtgtgttcggtgcaataccaaacacactgcagccggatgaacagcaatgcaaggaacttgggtggaatttgcagggatagcattagcttttcttgcgatgctgttgccatggaccatagaatgaaccagtctaactcaacgggcaaaaagctttgtcggaaaggttctcagattgatcaaacatacattctatgtggtgttctggtgtggcggcactgcattttttcttcatatatcagaggcgttctgaagttcctggatgcatcgtatcttctgattgttaatcttaagcagtctgaagtgcacactagtattacagtctcatatatgtggactgtttttcatcatgttgtttcccaggattgacgcgtgtgttgaaaatcttattgtataataagatgccccttgttttcgcagccatccatgctgaaacttttactacaccgcctaaaatctgtgtgctagttgatactacctgtgttctcgataaataaaaaagaatagaaagggctagtttggaaacccaattttctcaggggttttcattttcccaaaggaaattaattcattttttttttgggaaattgaaatcccataaaaaaatgggggtaccatactagccccaaaagttaaa

SEQ ID NO: 262 - DNA, 387 bp, Zea mays
atgaaatctgcacagtccaccaggaaaccttcaaaagcttcatcaagtgctggattgaaaaggggcaggagggcagcatttgaatccagtgaatctagcatatcagaaaccagtagcgacagtgaggaagagattctaaaacatggtccttctgaaaatagggcagggccaggtcaacaaactcgcagatctagcaggcagaagcaagaagttaagtataatgaggatagtgatgatgataattatgatgctgaagatggtaacacagttgaggatgatttttttggctctcctgctttgaaaaggttgagaaaagctggcctgttccatggcgatcacagtactaaaacagcaaagctgaatgaagacaccactggacataatggt

SEQ ID NO: 263 - DNA, 247 bp, Zea mays
atggctcggacactgtcctgcaaaaaatgtggtcattcgtctgctgctgttcgctatcctttcgaggacctgttattgggtttcccatcaaaggggcatccaaccaaaagtgctgcattaccacaaacaagtgagagtcccggatgggccggatctcgaaagagagtgattgctcgtcaattatttccagaagacgtgcagggaagcgtggattcagaggtgtttgatgtggaaaccttggaagttg

SEQ ID NO: 264 - DNA, 2353 bp, Zea mays
gaacgacctgtccggcgggatccccgcgcagctcgcgcggtgcgccaacctgacgctgctcaacctggcgtacaaccgcctcgccggcgaggtgccggatgttctcggcgagctcaggagcctgcaggagctcatcgtttccggcaacggcctcggcggcgagttcccgagatcgatcctgcggtgccggaacctcagcaagctggacctgagctacaacgctttccgtggagacttgccggagaacatctgcaacgggtcacggctgcagttccttgtgctcgaccacaacgagttctccggaggcatcccagcagggattgggggctgtacccggctgcttgagctgcagctcggtagcaacaacctcagcggcgaaatcccagccgagataggcaaggtgaagagcctgcagatcgcgctgaaccttagctccaaccacttcaccgggccgctgccccgcgagctcgggcggctcgataagctcgtcgtgttggacttgtcgcgcaacgagatatccggccagatcccaggcgacatgagagggatgcttagcttgatcgaggtcaatctgtcgaacaaccggctcgcgggcgccataccggtgttcggaccgttccagaagagcgcggcctccagcttctccggcaatgccgagctgtgcggcgacccgctgaccgtagactgtggatcatcaatctatggctccagctatggaacggagacggaccacaggggaatatcttacagggtggccttggcagtcgttggttcctgcgtgctcatcttctcgctggtgtcgttgctggtggcgttgttcatgtggcgcgagaggcaggagaaggaggaggaggaggcgaagaagaaggcggcggaggtggcggtggcggcagcagccccacaggtggtggcctcggccgtgttcgtcgagagcctgcagcaggccatcgatttccagagctgcgtgaaggcgacgttcaaagacgagaacgaggtgggcgacgggacgttcagcaccacctacagagccgtcatgccctccggcacggtggtgtcggtgaagaagctcaagtccgtggaccgcgcggtcgtccagcagcggacgaaggtggtccgcgagctggagcgcctcgcccacatcggccacgagaacctggtccggcccatcgggtacgtcctctacgacgacgtcgcgctgctgctgcaccagcacctggcgaacggcaccctgctccagctgctgcacgacaacggcgagaggcggaaggctgactggcccaggctgctgtccatcgccgtcgacgtcgcccaggggctggcgttcctccaccaggtggccaccgtccacctcgacgtctgctcggggaacgtgttcctcgactcgcgctacaacgcgctgctcggcgaggtcgagatctccaggctgctggacccgacgaagggcacggccagcatcagcgcggtcgccggctcgttcggctacattcctccagagtatgcgtacacgatgcgggtgacggtgccgggcaacgtgtacagcttcggggtggtgctgctggagatcctgacgtcgaagctgcccgccgtggacgaggcgttcggcgagggcgtggacctcgtgaagtgggtgcacgcggcgccggcgaggggcgagacgccggagcagatcatggacccgcggctgagcgccgtgtcgttcgcgtggcgccggcagatgctggccgtgctcagggtcgccatgctgtgcacggagcgcgcccccgcgaagcggccccggatgaagaaggtggtggaaatgctgcaggaggccagggacagctgagtggtctggttcctctgctcaatgatgtgtggttggctgcttggaacttggaacttggaagtcgaggcgagaaactctgaactgatcatcgttggagttcgagtatggagtccatccggtagcgtttgattctctgtatatattcggtaattagtatcccgatcatgcgccatggatcactggatgttcggtcttggagcaatgtctggaactctggatgcgtctttagcaaagcaattcggtgttctgcattgagggttttattttcatttgtttttgtttttgtttttttttttgaaaaaaaaaggagagagaagagaaattctatcccgatgtcgtccgctagaggaggtggttgtctgggtgctatttcttctctctaggagagcctggcccatggcgacgtggcagggatggcctctgtctgctgaggaagaggaatcgtgcctgtctgttaatacatgtatatagtatttttcttatttggtagaagaatatctgtggcacaaaaaaaaaaaaaaaaaagcggcc

SEQ ID NO: 265 - DNA, 2259 bp, Zea mays
tcgaggccggccgggccggggacttttgttttgttttatatatgggctccccgtctacttgcatccaaaagaactcctggggaaagaaacagagataaggagaaagacgggtttcttttatcgtcgcctgtcggacgtgctctgctgcagagtcttgcttcacccgtccggcacctcactctctggcctgctgtatatatccacctccctccggcctccatttcttctcgacttgaacacggccagcgtctcatcggctgggcgtggtctacactgcacgcacacttaccaccagccaccgcaagtgaatcactagccggaagacaggccaaccccactgctagtgctaggaatctaggagcgagaacgagagaccatgtcctcagaggccagcagcgtcgtcgtcgccgacgagaatggagcggcggagacggtcggcgtcgggcggtacgtggaaatggagaaggaccaagagtcgagcgcagccaagtcgcggctctccggcctgctctggcacggcggctccgcctacgacgcttggttcagctgcgcgtccaaccaggtggctcaggtgctcctgaccctgccctactcgttctcgcaactggggatgctgagcggcatactgttccagctcctgtacgggcttatgggcagctggacggcgtacctcatcagcgttctctacgtggagtaccgggccaggaaggagagggagaaggcggacttcaggaaccatgtcatccagtggttcgaggtgctggacgggctgctcgggaggcactggaggaacgtcggcctggccttcaactgcacgttcctgctcttcggctcggtcatccagctcatcgcctgcgcaagcaacatctactacatcaacgacaagctggacaagcggacgtggacgtacatcttcggagcctgctgcgccacgacggtgttcatcccgtcgttccacaactaccggatctggtcgttcctgggcctcgtcatgaccacctacacggcgtggtacctcgccgtcgcgtccctcatccatggccaggttgatggcgtgaagcactccgggccgaccaagatggtgctctacttcaccggggccacaaacattctctacactttcggagggcacgctgttaccgtggagatcatgcacgcgatgtggcggccgcagaagttcaaggcgatctacctgatggcgacgctgtacgtgctgacgctgacgctgccgtcggcggccagcgtgtactgggcgttcggcgaccagctgctgacccgctccaacgcgctggcgctgctcccgcgcacggcgttccgcgacgccgccgtcgtgctcatgctcgcccaccagttcatcaccttcggcttcgcctgcacgccgctctacttcgtctgggagaagctcgtcggcctgcacgactgccgcagcctctgcaggcgcgccgccgcgcgcctccccgtcgtcgtccccatctggttcctcgccatcatcttccccttcttcgggcccatcaactccgccgtcggctccctcctcgtcagcttcaccgtctacatcatcccggcgctggcgcacatgatcacgttccggtccgcaacagcccgtgagaacgcgatggagccgccgccgcggctgctggggcgttggacgggcgcgtacatgatcaacgcgttcgtggtggcgtgggtgctggtggtcggcttcggcttcggcggctgggcgagcatgacaaacttcgtccgccagatcgacaccttcggcctcttcaccaagtgctaccagtgcccgccgccaccgcccctgccgttccccggcggcggcctcggcaacatcacgatgccattcaacggcgacgggctccctcctaccccggctccttcgccggcgcattacttcttccgccaccaccggcatcacagccaccaccgcgggctctgatgagagacgatgaaatgaacccggcttaccaccagtagtgcgtgcgtggcacactgctgctttagtttgagctgatcccttagttaagtctagcttaattagcacctgcatgcagcatcttcgttctctcctctagcttgctggtgtcgaacgcatgctttcccggtttcagtgactttagagaccctgcctgagcctgacacgaggggagtatcactgtatcagtactagcatgcagtctcttgtgttccgggctgtgtcctggcgtggagctcaaagaaggggaatccatttctacagccgcaaaaagaaaaaaaaaa

SEQ ID NO: 266 - DNA, 133 bp, Zea mays
atgcggatgaatgagcaaagtgttgcgttttctgcgggccacgccactgaactgaacgtggctctcagcgcagcagacgacgttcttccttctcctacagggcaggctcagtggctcgccagattgttcagag

SEQ ID NO: 267 - DNA, 4499 bp, Zea mays
ggcacgagctctgttcctcatctcccgttcaccccgcgggcgcagggcgcgctctctcctcgtggcgatcgccgaccgtagcggccgctgcccgggttttcgtcggccccttcgccatgtcttcgctggacccttcgccagcgacgagcacccaacagcagaagcaattggagagtttggtaaatctactgacgcagggaagcaggttctaccgcaaagcatataatgaactgttctcaggtgtaactactgagcaggatccggattcatcgactaatattcctgagtatatgctttttgggtggcatctcttcttaatgctccatttgagatcaccagaattgttcaaggacctggtgtcctgcatccatggattagttgctgtgttggccatacttttgattcacgtgccagctaaatttaggagcttcacgattgaaggctcttctcacttaatcaaacaaactgagaaaggcgtggatcttattgcttcattatgtcataactatcatacctctgaagaacgtttgaaagaaatgttgcacaagtctcacaatgcaatagaagacattttccatatgaaagcactaagtgcttcagagtgcaaaccagaaaatttggataagatagacacagatgacctgatgtatttcaaaggtctgattgatatggaatgtttccagtcaaatttggaaaaaatggagaaactatgtaattctaatagctgtaaaggggagcttgattttaaatcaattttgatcaataatgattatattccctatgatgagaactcgacgggggattccaccaatttaggacattcaaagtgtgcctttgaaacattggcatctcccacaaagacaataaagaacatgctgactgttcctagttcccctttgtcaccagccaccggtggttcagtcaagattgtgcaaatgacaccagtaacttctgccatgacgacagctaagtggcttcgtgaggtgatatcttcattgccagataagccttcatctaagcttcagcagtttctgtcatcatgcgatagggatttgacaaatgctgtcacagaaagggtcagcatagttttggaagcaatttttccaaccaaatcttctgccaatcggggtgtatcgttaggtctcaattgtgcaaatgcctttgacattccgtgggcagaagccagaaaagtggaggcttccaagttgtactatagggtattagaggcaatctgcagagcggagttacaaaacagcaatgtaaataatctaactccattgctgtcaaatgagcgtttccaccgatgtttgattgcatgttcagcggacttagtattggcgacacataagacagtcatcatgatgtttcctgctgttcttgagagtaccggtctaactgcatttgatttgagcaaaataattgagaactttgtgagacatgaagagaccctcccaagagaattgaaaaggcacctaaattccttagaagaacagcttttggaaagcatggcatgggagaaaggttcatcattgtataactcactgattgttgccaggccatctgttgcttcagaaataaaccgccttggtcttttggctgaaccaatgccatctcttgatgacttagtgtcaaggcagaatgttcgtatcgagggcttgcctgctacaccatctaaaaaacgtgctgctggtccagatgacaacgctgatcctcgatcaccaaagagatcgtgcaatgaatctaggaacacagtagtagagcgcaatttgcagacacctccacccaagcaaagccacatggtgtcaactagtttgaaagcaaaatgccatccactccagtccacatttgcaagtccaactgtctgtaatcctgttggtgggaatgaaaaatgtgctgacgtgacaattcatatattcttttccaagattctgaagttggctgctattagaataagaaacttgtgcgaaagggttcaatgtgtggaacagacagagcgtgtctataatgtcttcaagcagattcttgagcaacagacaacattattttttaatagacacatcgatcaacttatcctttgctgtctttatggtgttgcaaaggtttgtcaattagaactcacattcagggagatactcaacaattacaaaagagaagcacaatgcaagccagaagttttttcaagtatctatattgggagtacgaaccgtaatggggtattagtatcgcgccatgttggtatcattactttttacaatgaggtatttgttccagcagcgaagcctttcctggtgtcactaatatcatctggtactcatccagaagacaagaagaatgctagtggccaaattcttggatcacccaagccatctcctttcccaaatttaccagatatgtccccgaagaaagtttcagcatctcataatgtatatgtgtctcctttgcggcaaaccaagttggatctactgctgtcaccaagttccaggagtttttatgcatgcattggtgaaggcacccatgcttatcagagcccatctaaggatttggctgctataaatagccgcctaaattataatggcaggaaagtaaacagtcgattaaatttcgacatggtgagtgactcagtggtagccggcagtctgggccagataaatggtggttctacctcggatcctgcagctgcatttagccccctttcaaagaagagagagacagatacttgatcaattataaatggtggcctctctcgtatatagctcacagatccgtgctccgtagcagtctattcttctgaataagtgggttaactggagcgatttaactgtacatgtatgtgttagtgagaagcagcagtttttaggcagcaaactgtttcaagttagcttttgagctatcaccatttctctgctgattgaacatatccgctgtgtagagtgctaatgaatctttagttttcattgggctgacataacaaatctttatcctagttggctggttgttgggaggcattcatcagggttatatttggttgtcaaaaagtactgtacttaattcacatctttcacatttttcactagcaatagcagccccaaattgctttcctgactaggaacatattctttacaggtataagcatgccaactctaaactatatgaatccttttatattctcatttttaagtacttctctgtttctgctacttttgtactgtatatttccagcttctccatcagactgatgatcccatattcagtgtgctgcaagtgatttgacatatgtggcttatccttcaggtatgtctcatgttgtgacttcattgctgattgcttttgtaatggtactgttgagttcatttctggttacaatcagcctttactgctttatattgttctactaattttggcttgcacagccaggatgattggttttctgcatcaatcaatcttttttaggacaagatatttttgtatgctacacttcccaaattgcaattaatccagaagtctaccttgttttattctattagttctcagcaacagtgaatgaatatgaatcagtcatgctgatagatgttcatctggttattccaaacaatctgacatcgcatctctttctgcaagtgagatgaagaaaacctgaaatgctatcaccatttaaaacattggcttctggaagttcaggtgattagcaggagacgttctgacattgccattggcatgtacggtagtgatggcaggagacgttcttaaacagcagctgctccttcagcttgtaatgtctgattgtattgaccgagagcatccaccttgccttatggtactaactgaatgagctggtgacgctgactcatctgcataatggcagatgcttaaccatctttaggagctcatgtcatgattccagctgcaccgtgtgcaaatgtgaaggccctgcaagcgctttccaggccgcaccaatcctgcttgcttcttgaagatacatatggtgccacctaaataaaagccgtttctggttatgtctgtccttgacatgtcaacagattagtgttgggttgcaatcatgtggtgtttaagtcttggagaaggcgagaagtcattgctgccagcattgtgatcgtcaggcacagaagtactcaaaagtgagagcctacttgttgcgagcaaatggagggcgatataggttgataatcaatttcagttctctatatacaagcagcggattttgtttagagttagcttttgagatgcatcatttctttcacatctgattctgtgtgttgtaactcggagtcgcgtagaagttagaatgctaactgaccttaattttcaccgaataatttgctagcgtttttcagtatgaaatccttgtcttaaaaaaaaaaaaaaaaaaatcatgggtatattttgtctttagatacttgtcatgtttttaatcatttattacatatttatagttttgactccaagtactctgcgttgttaccactgcttaagggcgaaaa

SEQ ID NO: 268 - DNA, 191 bp, Zea mays
ctgcagtgcgcaccagaaaacgcatggcccgccgcccgccggggccgctccgtggctccacagggtggagactggagaatggagatcgagcagtggagcttatgtatgagggaaaagcttttgccacactggatagcagatagctattctcgatatctggattcacgattgaaccaggctcacggcgacag

SEQ ID NO: 269 - DNA, 1539 bp, Zea mays
accctcgaggctgccgggacccaccccacggcccgcccacctcctctccacctcctcgtcctcgatccccaagcagtcagtcttcctctcccctcccctcctcccgttgggtaggctggcgagccgccggccgccgtcccttcctccctggatttgattggtgctcgcggccgcggcccagcgagctccaatcgattccagggaggcggggagcaccgccatcgccatgggagggcgccgctggctgtcgtgacctcaccttgccgctgcagctctgtaagtaggtacctagtattccagaggtgatttctcttcattgacagagagcaaatctggttcgtgatccctagtaccagagagggacacggttttcctatcgatgtgttagagtcaagtactcaagcttttgtggttccaatggagtctaagcgtgtgagtgatcaggatgctttgatcgacctggagagtggcaatggcactacagtaagcaactacaccaatggtggggatgctagtttcacagtggggcaagcaagaacagcgcctaatggtgcgtggaatggttgtgtgtgtgccaacgggtgtccgagggacgacaggaatcagcacatggattgctcccctcctgcttcggatgctgttgctagaagtggagatgacaggaagtctgagggggaggagaagcttatggacagctcaggaggggagaagacgaagaagaagcggtccaagaagccaccgcggccgccaaggccgctgacacctacgccgttggatgtttctgcccagaagctcctcaacgaactgagtgagcttgcggggttgaaacgggcaaggattgagcggatgaaggctttgaagaagatgaagaatgccaagcaagggtcctcgggtggcaatttgtgccccctgatcattaccattatcttctgcatcgtcatactgtggcaaggtttcttctcgggacacgagtcggcggtgagtttccatggatcgcccgagtcctcagtcagggcacacagcagtctgatctccatcaggttctacaagaagaaccattccaatgtgagaccacccagcgagaccaccgcagcccctgataacgtagagacagtttcaaggctcctggaaccgtaaccaagcgagaagaaggctagctcggtgaccgaacgctgcgggccgcggccaccaccacaggtacctgaacggaaaagctcgccacattctgaagcctctcaccttgacgaccggggctgtgtaaatcttccgagaccgccactggcgcttcctcctcgagcccctgctgtaaaaatgaacggactcctagcgttttgtgcgcctgggtcgcacgctgactagtgaatctgttggcagttgtgcgccgcagcccgcaggccatggctctagtgacgagagcgacgcgagcaagctgtttgtatgtgtctgattacaataataaaaggtttcgcgctgtttaaaaaaaaaaaaaaaaaaaaaaaaaaaaaaaaaaaaaaaaaaaaaataaaaaaaaaaaaaaaa

SEQ ID NO: 270 - DNA, 2381 bp, Zea mays
ttttttcgtctccaacaaacttcactctgcaaacagtgtggaacagtataaattacagtgccgcattctctattttacacgatccgaagacagtcttaacagtgatagacatgtgatgcggattgtcgtgtggaagatggcacgcggactctcaccaagtcaagagctaaccttatacagaaagcagtggccactgtatatttttttggcaaacaaattcacttgtcactgatggtgcatcaggtcttgtaaatataagcatcaggccaccagctagtacagaacaccaatcacttttccgcgatcgtgtaatcgtgtgccaaggcaagaagcaaccggcatggcaatgcgatcgctgtgcttgccgctgctgttgttctccgtgtccatctcaatcccccccgccgtatcagcaaacgaagagctggcctcgcttctggccttcaaggtggcggcgatcagcggcgggtacggcgacccgcttgcttcgtggaacgagagcagcgccggtggcggtgggtactgtagctgggagggggtgagatgctggggcaagcaccggcaagtggtgaagctgagcctgccctcacgtgggctcacaggcgtcctctcgccagccatcggtaatctgtcatccctatggactctcaacctgagcaacaacgggttccacaacagcatcccggcgagcctcggccgcctgcaacgcctccataacctggacctaagccacaatgccttctctggtaagctccccgccaacctgagctcctgcaccagtctggtgtccttgggcctaagctccaaccagctccatgggcgtgtgcctcccgagctcggtggcagcctcaagcgcctcaggggcctcgatctcttcagcaacaacttcaccggcaccatcccggcatcgctggccaatctgtcgtctctgactatcctggaccttggattaaaccagcttgagggcagcatcacgcccgatctaggcggcatccagggtctccaatggctctcactggattacaacaaactatctggcgagctcccgcgctccctattgaacttgtcttccttaataacgatgcaggtccaaggaaacatgctccatgggggcattccgtccgacatcggtagcaagttccccaacataacgatccttagctttggcaagaaccagctgacgggatccatccccgcttcactctccaacctcaccactctccaggatgtcgatcttatcacaaataggctaagtgggcatgtgccccgggcactggggaggctgcgagctttggaatcactaagcttgcacgacaacatgctagaagcaaatgacacggagggatgggaattcatggcttccttgtaaactgcagccagctccaaagcttgactatcagcaccaacatcggtcttactgggtggctgccagcctcaatagtgaatctctcgacgaccatgcaaggcctcatgttggctgacacagggatcgtaggaagcatccccttagaaattggcaatcttttcaacctccagttcttcagcgtgtcaaatacttccgtgtctggtgcggtcccagatagcattggcaagctggtaaacttggttgaattaaacctgtacaataccaatctgtcagggcttataccttcatctattggaaatctttcagagttagctgcgcttgttgcattcaatagcaatctggagggaccaattcccaaaagcatagggaggctgaagaacctctatgcccttgatatctcaagtaaccgcctaaacggttcaattcccgtcgagattttccagctaccactcctttctagatacttaggcttattacataattcattatcaggtaccctacccgctgaggttggtagcttgataaaccttaacatcctggcgctgtctagaaaccaactgtctggtgagatacctggtagcattggggactgcaccgtgttgcaggaacttgggctggatgacaacttatttgaaggagccatacctcaatctctgagcaatataaagggcctaactggactcaacttgttcatgaataagtcgactggcgtcattcctgaagccattggtagcatgcgcaaccttcaacagttgtatctggcacacaacaatttgtcatggacaatcccaataatattgcaaaacttgacattgtcagaactcgatctatacctctacaatccgcaatgggaagtgccaaaagaggggatattcaaaattttggctaacttgtcaattactggaaataatgaaccttgtggcgggattactgagcttcgtttaccttccgtgtacaaaaaagtgctgaaaagtaaccaaaaagaaaagttgaagtcctttacaatatggctaac

SEQ ID NO: 271 - DNA, 704 bp, Zea mays
cccttgcttggttcatgtcaaatcaggaaactagttttgtgacaattggacaacgagtgcttgccaatccactgagggttcggtttcattatggccatcctgatgtcttcgatcgtcttttccacgttacgaggggcggtgtcagtaaagcatccaaaattatcaatcttagtgaggacatctttgcaggattcaattccacattgcgcgaaggcaatgttactcaccatgaatacatgcaagttggcaaaggaagggatgtaggtctcaatcaaatatctctgtttgaggcaaagatagcaaatggcaatggcgaacaaacgctgagccgtgacatctaccggctaggtcatcgctttgatttcttcaggatgctgtcttgttactacacaacaattggtttctacttcagtacaatgattacagtatggactgtatatgttttcctctacggccggctatatcttgtacttagtggactcgatgaagcactggctactggaaagaggtttgtgcacaatacacctctccaggttgctcttgcgtcagagtcttttgtgcaacttggatttttgatggcgctgcccatgatgatggaaatcggtttggagagaggattcagaactgcattgagtgattttatactgatgcagcttcagttggcctctgttttcttcacattctcggtgggaacaaaaactcac

SEQ ID NO: 272 - DNA, 231 bp, Zea mays
ctgcagcatatattatatctgtagctgagctaatgttttagccgctcgcctgttcctgctaaattggcattttgaaatctgttcttgtttcaggactcctatgtggttcaaaaggatgctatcaccgtcgaagaagactgaaaatagtccagtatttaggttttttatggatctgaatgatgcagtatcctatgtaaagcgactaaatgtgccaagcggcatggtgggggc

SEQ ID NO: 273 - DNA, 2261 bp, Zea mays
gcacgagcgtgtctccatttcccgcagcagggcccattggaagtttggaattggaaacccaaaaagcataggcggggggtggcaggggaagcacggagcaagagattcgtttgctgccattattaaccgagccgagccgagagaggtcaagcaacggacctcccattcgcatccgcgctccttttccttggagccgaagaagagggaaaggaagggaggacagccgccgccgccgccgccgccgccaccgtcaggatgcattccacgaacctcctgctcgaggagcccatccggcatggcctccatcctcgagccctccaagcccagctacttcccggcgatgaccaagatcgtcggcactctcggccccaagtcgcgctccgtcgacacgatctccgcctgcctcaaggccggcatgtccgtcgcccggttcgatttctcgtggggggacgccgcgtaccaccaggagacgctggagaacctcaagctctccatcaagtccaccaagaagctctgcgctgtcatgctcgacaccgtgggcccggagctgcaggtggtgaacaagagcgagaccccgatctccctcgaggagaatggcacggtcgttctcacccctcaccggggccaagacgcctcctccagcttgctgcccatcaacttctctggactcgccaagaattgttccttgcaggcggtgacaccaggggcaacaatattcgtgggacaatacttgttcactggcagtgagaccacctcagtttggttgggaggtttctgaagtgaaaggagatgatgtggtgtgtataatcaagaacacagccacctttggctgggtcactgttcacgctgcattggctcccagattcacattgacttgcccaccctgtctgatgagggataaggatgtcattagaaaatggggtactcccaataaagattgaccttcctttctctgtcctacacaagacatgcagaggatgtggcgccaggcacgggaattcctgtccaaaattgggcgatctaagccagactctgatttttgccaaaattgagaatgtcgagggcctgaaccaatttgatgaaatactggctgaggcagatggtatcattttatcaagagggaacctgggaattgatcttccacctgagaaggtctttttgtttcaaaaatctgctcttcacaagtgcaacatggctggaaagcctgctgttgtcactcgtgttgtggacagtatgactgacaacctcaggcctactcgggcggaggcaactgatgtggccaatgcagtacttgacgggagtgatgccattctccttggtgctgagactcttcgaggtttatatccagttgagactatttcgacagtgggcagaatttgtgctgaggctgagaaggtattcaaccaagatttatacttcaagcaaactgtgaaatatgtcggagaacccatgacccacttggagtccattgcttcctcagcggtgcgagctgctatcaaagttaaggcttcggtgatcatttgcttcacctcttctgggaggggctgcaagggctcatcgccaagtacaggcccaccatgcctgttctttctgttgtcattcctcgtctgaagacaaaccaactgagatggagtttcactggtgcttttgaggcaagacagtcgctgatagttagaggcctctttccgatgcttgctgatcctcggcatccagccgaatcaaccagtaatacaaatgagtcagttctgaaggttgctctagaccatggcaaggcatgtggtgtgatcaagtcccatgaccgtgttgtcgtttgccagaaggtgggagattcatcggttgtgaagatcattgagctggacgactagggcatactttgccgatttttttttttttgacgaggccggaatttgttggctatatgtataatcctatagctttctttacaaatgagcagtttttccctatggtgccacatcataggacttgcttagcgatttaaaactcgattatgtgccacctaaaatgggcagatggaacaatgaaatcatactgtgccctttatccgttgctattgttaacctgagcctgtttttgtgctacaacataacaaaagaagcgggcggtcctacacctgcagctttcgatcgctctctcgagcattaactgaacgctgaccccacttacctgcataggtggcacctcaagacacttgccatctactgaatcaacgacacgtgcactcacctggaatgctatcgtgc

SEQ ID NO: 274 - DNA, 1866 bp, Zea mays
gccgccgttgggtaccttgcggccggccggggctcgcagccagcaggacaccactcatcttcttctcccccgcctcgtttccatcgccaccaccctcttctcctgcggtcctcccccgtcccactcccacccccctcgcctccgcctccactgcagctgccgccatgcagagcctcctcctgcccaccgctgccgtggccccggtggcgcctccgtgcggaaggcggaatctcccgggacgcctctccgtccgcgcctccgcgacggtggtagcggcaccgcggcgggagacggatcccaagaagcgggtggtgatcacggggatggggctggtctccgttttcgggaacgatgtagacgcttactacgaccgcctgctagtcggggagagcggcatcgggcccatcgaccgcttcgacgcttctaagttccccacccgctttgccggtcagatccggggcttctcctccgagggatacatcgacggaaagaacgaccgccgccttgatgattgcctccgatactgcatcgtcagtggcaagaaggctctcgaggcctccggtatcgcccacggctccaagcccatggaaaagattgacaagacccgggccggtgtgcttgtgggcactggtatgggtggcctcacggtgttttcggatggtgtccagaatctcattgagaagggatacagaaagataactcctttcttcatcccatatgctatcacaaacatgggttctgccctgcttggaatggacattggtttcatgggtccaaactactccatctcaactgcctgtgctacctcgaactactgtttctatgctgcagcaaaccatatccgtagaggcgaagcggatataatgatagctggaggcactgaagctgcaattattccaattggtgttggtggctttgttgcatgtagagcactgtcacagaggaatgatgaccctaaaacagcatccaggccttgggacaaggatcgtgatggttttgtcatgggtgaaggagctggagtcctggtcatggagagcctagagcatgcaattaaacgtgatgcaccaataattgcggagtatttaggaggtgctgtgaactgtgatgcttaccatatgactgacccgagatctgatggtcttggtgtttcatcttgcatcaagcaaagtctcgaagatgctggtgtggctcctgaggaggtcaactatattaatgctcatgcaacatcaacccttgctggtgatctggcagaggtgaatgccatcaagcaagtcttcaaggacccatctgggatcaaaataaatgcaaccaagtccatgataggacattgccttggtgcagcaggtggtttggaagccattgctactgtcaaagcgataactactggatgggtgcatccaagcataaaccaatttaacccagaggaagcggttgaattcgacacagtacctaatgtaaaaaagcagcatgaagtgaacgttggcatctcaaattcttttggatttggaggtcacaattctgtcgtagtatttgcgccatttaagccataaggtgttcctggcctcacaaaccttggtcagaacaacgaggatctttaggagtttctgcgttcaattttcatgtgttctctttaggggaagttatgtcagatctgagccggcaacgttacaaatgaactaaagctgagatacattgctttttagataactccaggttcacttaggttgtgcgcggctgtacaacgttgctttgaatcatttgtaattgattgtactgttttttcatgtaatggaagaggggttctgtagatgcaaaaaaaaaaaaaaaaaaaataactcaatagcatacaattgaaatttggaaggg

SEQ ID NO: 275 - DNA, 1823 bp, Zea mays
tttcgttttttttttttttttttttcttttttttttttttttttttttgttttttttttttttttttttttttgggggcgacaacacgggtcaacaagatatagataggcgaattaaagcattacagctagctgcaaacgctcaccaccagcaccgcgtgggtcttaatccaaggacagaaataggaaaagaatagtatattcgcccccatatcgatcctccccacgtcgccgtgctcgttttgcgcgtccaccagcccgccccccaaccccacccagcgcgacgaagccggggggcgatcgctccagcgccgccggcgacctccgccccgggagccgccggcggtaccccgctctctgtcccgcctcaacgaaccctcaggtccaagtagttcgtttcgtgagttatccaaaggttgcgccgcaaagatgagtactgctaatcactaccaacacatcaagtcaactaagcctgttgtaggcaaagcaagaaaattgaaggatctcatgataaaaagtgacaataggatatgtgctgactgtggtgcacctgatcccaaatgggcatctgctaatattggagtgtttctttgcttaaaatgtggagatgttcatagggcacttggacctgacatctcaaaggttttatctgtaactttggatgattggtctgatagtgatatcgactccatggttgaggttggtggaaactcatatgcaaattcaatttatgaggcttttcttccaaaagatcacccaaaacccaaaccagattcaacgatggaatataggacaaaatttataagagctaagtatgagacacaagattttttgaagccaagtttgcgcatttcatcaagatcatcttttaaatctaccacttctgtgaagagtgtagatagcaatttctctagcacttcaaggaaggatgtctttgaagatacaagagaatttgttggagagttgaatatcacactggtcaaaggcaccaacttggccgttagagacatgctaacaagtgatccatatgttgttttaacgctcggagggcagaaagttcaatcaacggttaaaaaaagtgatctgaatccggtatggaatgaagtgcttaagatatctgttcctcgaaattatggacctctaaaacttgaagtgtatgaccatgatatgttctcagccgatgatatcatgggtgaagcagagatagatctccagccaatgatcacagccgccatggcctttggagatacttcacgtcttggtgacatgcaaattgggaggtggttcatgaccaaagacaacgccctgatgaaagatagcacggtgaatgttgtggcaggtaaggtaaaacaggaggtgcacttaaagctacagaacgtagaatcaggtgagttggagttggagctagaatgggttccgatcctctagactaatgataactcccctgatctttgtctaaaaatctatactcaagatgcatcgatgtttccaagctgtccacttgatggtcttggacatttttgctggatggtttgaatttgttaaaaatgtcactgtagaatatcatggtgtaactgtcggttgtactcgcgcctttcaccccccctcccggtaactggttatcatgccttgtaagcactcgctgtctcttgattgttgttgcattgtcccattgaaaggacctgtgtcttgtaagagatggcaattatagccagtgaactctttgtgctgatgccatgttggcgctgtagtagctaagaaaaaaaaaaaaaaaaaagcggcctcagcatgatgctctgagtgcatatacgctacaagcctaca

SEQ ID NO: 276 - DNA, 1713 bp, Zea mays
gcacgagaccattacctagaacatcctaatcgaaaaaaaatcacttcaggtaagggcgaagaagagcattccctctcccggtctccccatctcccgaaccgcgtgagccaaaccctcccagctcgcgcgccctcgatggatgcctccgccgccacccccgcccccgggccttccttctctggcgccgagtcctccgcggccgccgcccagccgccggcggaggctccgcagttgcgcgtccacggcgccggcagcggcagcggcgtcgcgcgagcctgccgccaccacgcgtacagccgcaagcagaagtcgctcggccttctctgctccaacttcgtggcgctgtacgaccgggaggacgtggaggtgattgggctggacgacgcggccaagcgtctcggcgtcgagcgacgccggatctacgacatagtcaacgttctcgagagcgtcgggattcttgtgcggagggccaagaatcggtatacatggctcggattcgggggagtccctgctgcgctgaaagaactcaaggagagggcgctaaggaagatgtccggatcaccggtgttactgtcaatggaggactcgtctactgccaacttatcagatgatgaggatgatgaaaaattgggcgatgctgatgaagatgctgagagcgagaagctcagccaacctgttgacaatacgtctgataagcctgacgcacccagctgccgccttagatctgatcatcggaaggagaagtcccttgggctcctcactcagaattttgtcaagctcttcctcaacatggaggttgggacaatctcacttgacgaagctgcaaggcttctccttggagagggacatgcagacagcaacatgagaaccaaagttcgtcgattgtatgacattgccaatgtgctgtcttctttgaacctcattgagaagacgcagcaagcagacacaagaaaacctgcattccggtggctaggccaggcaaagcgaaagcaagataacaatgtcatggtttctgtacctccatcgatgaaggcaatgcccaataagagagcatttggtactgatcttacaaacattgacaataagcgaggcaagttagactcagcagcggagaacaaagtcaagctcatgcagggtgctggtaacatagtgaagacttttgagaggcagctggtgcaagggaaaaggagtgactttgtttatgggcccttccaccctgctggtgcaaagaaacacgaaactgatgatcaaactgttaagcagcaggagaggaagaacattcaggactgggaaaaccttgctgtgtccttccgtccacaatatcagaatcaagcactgaatgatctttttggtcattatgtggaagcatggaaatcatggtacgtggatcttacccaggaaacggcatcatgaagcagaatgttggcaggtcagttgtaacttgtaagccgtttccagtagttagatcaactgagttgttgatgcttgcttagggaaccaccctgtacaagatggaataaaaacacgaaggcaattttgtctttcgactgtatttactcgaatgctagaagtgaggccattttttcataaggaaaaaggcagggaaaatggggaatcgatcgagttatcaaattgttgctagtggactattctggagtcaaccgagttgtcccccaaccaaaaaaaaaaaaaaaaaaaaaaaaaaaaagaaag

SEQ ID NO: 277 - DNA, 380 bp, Zea mays
ctcttgtccgggcgaagggctccccaatgcaaaatcagggaaccgcttgtgttggtcacctccaggctaatctctgacaccaaaccctgcggcgctgggttcactgcaacctggagctcggagttggaatccagcgtgaactttccgataaggtcgggggacgcgcggtccgcggacgtggcgacggcgcgcggcacgacggggccgcggctagaggcggagagcgtggtggggcggcgctggcccccgctgcgtcggagggacgctggctgcggctgctgctgccgcttcgctggcgaggaggccgcgggccgtgcgcggaacgcgagcgcgcaccgctcagccgccgctgcggaggccgcggcactgaatccggtcat

SEQ ID NO: 278 - DNA, 2190 bp, Zea mays
tgcaacgcgacccgcagcgtctcggcgacctttggagcttcagggcggcagatcgacgtgaccggcgacctcgacgagtgccttatgtttatgtacacagtgcggtggccacgcgacgaggacgaggcagcacgaacaaggacattcccagaccacaacattcctagagcattttgtacaccacctgcgaacagtcgcgagcgacggtcccttccactagttccaccacaaccacaaggtctcatgcctcctagagctaaccgcaccccgcgcacgccgacacggttcacctcggcacggtgtccgtcgtcatcgtcgccgccgccgagggagggggcggtggggcgtgcgtctggtcgtcgtcggagacgctggcgaggccctggacgaggcgcacgatgtccgcggggtcgtccaggtagtacttggccttgctgggcttgcgccccacagtgcacgcgaacacctccgcctccgcctgcagggaggacacgcccctcgcggccgccgccgccgcgatcacctcgaacatgtcctcgtcggaccggtcgtcgcccacgcacagcacgaagtccggcaggtcgtcgtcggcgtcgccccgctcctgcgtcgtcgacaggatccgcttcgccaccaggcccttgcttacgccctgtggcttcacctcgacgaggttgggtccagctttcactgagaccggctcgtttgcaagcacgctctccagatggtcgtggagctccttggcctggcaggatccgaaatctggatcggcgtcctcgtagcaccacacgatggcagtctccttgtcctcaatagtcgacccgtccgtagtctcggtataggtcttcatcacaggctctgcgatctgcttccagctgcagtctatcaccggaacgcatgtctcccattctgcgtctcttctcagcctgaggaagcagccgtgttcagctgctagtccaaggctctcacatggtaagaaccattcgttcagagtcatccggctctttgcgctcacaaggaagaccatgttgttcctgtcgcggcaaaggctgttcaacatgtctatcgtccttgaggtaggactcttaccgagcgaagtctgcggcatcagcgtcccatcgtagtctaagagaatgacacgcttcttcgtcctccggtaggccaagaccaagtgctccaccgcaagcttcttgaagtttgggtcgagggccacaaccctgaacttcagcccaaaccctatgccccagcaacgcctcctgttatggtcgaggcaaatccgctcaagatcttgcaggaagctgttcgcccagtacccgacgtcgtgcgtgctcacgtatctgtggtgtttctcatgtctcaacaccttctccccttccggcatctccagcgcgtagtccattgcgtcggctactgaatcgatgttccaagggttcacacggatagcgccgctcagggagggcgagcagccgatgaactctgacacgacaagcatgctcttcttccttgaagccggaccaaggcctagaatactatctatcctctcattcccttgtcgagcaattacgtactcgtatgggatcaggttcatcccgtccctcactgcagtgaccaaacagcactccgcgacgacatagtaagccatcctctcatagaactgcagaggctggtcgatcagtatcaccggctggtaacctggctgcccgaacgcgtcgttgatgcgcctcaccattgcatcgctctcttcctgtacctccctcacatcctttccccgcccccttgctggattggcgatctgaacaagcaccacccttccccgccactccggatgctgcattaggagctgctcaaacgccaaaagcttcaagctaattcctttgaagatatccatgtcatcaacaccaagcaacagcagacggttccgatgacagaactgtttcagaagctcggccaccttgaccccaagctccgggaggttgaggactgaccgtagctgctccaagtgtactcccacaggcaagatcttgatagtaactgtccggccatagtactccagagcaatgtagcccctctgcgactcatacttgagcccgagcatcctgctgcagcacgacaagaagtgtctggcataatcaaaagtgtggaagccaatcagatcggcgttcagcagcgaccggagcagcggacgcgtgg

SEQ ID NO: 279 - DNA, 3633 bp, Zea mays
tttttagtgtagacaccagctagcttcccagttcttttatttctagctctattccaagtgaacagcacaaaactttcaaagtgaaaaaaaaaagattatgtgactaacagtttgctgtacaattatacaacatgaactctcttgagtcacgagtttggtggtggtttggatatgccctctgatccaagaaaagaactcctgagcccccacctggacctttgaaaggggggcaaggagagaaaccgaaaaaagccgaataaggttgcaagttgctcagcagctgcatgtttaccttcggatcagcattcacagtgaaaggcagagctaggcaaacatctattgtcgggtgctacctttctaatgcttatctcgctaattgctcggaccatgtgaggggagatatgtattcggtccattaggttaactttgggggcctcgagaatagccttgggaggagaaactgcatactggatcgcccaaatggcaagaggccgcatgtatacgagggatctataatgcccatctgtggtccatccttctggtgtttggaaccaatacccatatccttcttctgaccatcccgcagtaaaaattccttctgcggtcgtaaagccttgatgctccattccatggagcagcatatttgcagcaacagcgtatgtaacaccagtccagatttcacgtgattgcatgcatgtctcgtccacctttccctttggagtcataccatttacagctcccatccgtcctcctttaaccttcatcacattgaattcaaatattttttgcagagcagttcttatcttgtgctcatcgaaaagcgggggcaagcccgacgaggcagcataccactgtcctgccagctgatcggcctgaatggatctactattgctacttgtgccgctgtcgtaattgaaatatgacccattccataacttcgcctcatatactgctttggcttttataaactttagcttgtacttctcagcaaagtgccgatccccaaggcgatgagccattgtagctgcagcttgaagtgcagcaagccaaagacaaccacagtaagcactgattccatgaacagtccaagcatcataggtttgatcaggaaatccatcattctcaatcagaccatcaccatcacggtcaaactgatccatatagtccatagcagcacagactgcaggccaaacatctcgaccgaattgcatatcacctgtagcagcaaagtctctgtatatctggagcacaaatttggggttcaaatctttccatttgcttgtatcgtgtatgttatatgcattcatttcatgccacggatcatgcgttccgaggtcatgaggcactgcacctttagccttgcggattccggatgtaccatcagccaaaaattttactttgcgccgatcttcatacagcacagcattggcaaaatcacgttggatactcaactctatttttgggaacaaatcaaggagagcaaaagatgcgtagaaatgcacatcatatgtgttccacatgatgtattccactccttctagatacaaaaacttgccaacgtgttcagggccatcctttgaaatcaagtaaggaattggctcttctgacttgagtccattggtttgttcttgcaattctgatccatgaactgctgcgaacttggatacactatgatcatcaccattagccatgtaaccaccatgaggtacttgctccactgccaggttgacatgtctatctttaacagatccctgatttgtgtctttagtacccctctttgaggacttctggtgattaaaaccaggactctttttctcatcgattgctgggggttgaccatctgtccaaacagtccccccagctaccagaaagtaaagctcattaaaaagagtgaacttataccattctggaagcctttcatccttcagtatggggttttgccacttctcaatttcttcttcccaaagtttatattttgttaaggcatcatgtaccaaattaacagccgatttctcagaagttccgtagaattgggtgtacctcctgttatatgtgcatcctttttgaaactttactttaggtgaggaccaagccagagcaaacacaacagtacatctaccatgtggctcaacccaagttgaggctgagacagctgcacagagtttctgtcctggagaagaaggcatactgggaccagcactgaaattttcccgatcaaagtgaccattctgtagcatggtgttccacatttcctttgcggaaacatggttttctccagaaagaccaaacactggcaagactgtcacattcacattctgagtttcgcaggcagcaacagcaaaagtgacaggtggattatccttggctgttttgtgatgcagaagcactcctgatactccatcttccgcaatgaagggctcattgtagtggcctcctgaattatgcgaaaaacctccaatagaattcgcccatgtcattaacaggcttacttttgcacgatctctcccggtgtttactagagtatacacaaacacagatgttggaagactgctatccttgtaatcatgaggaatgaaaggtgatatctgacgacatgagattttaaggtctggatcaggttcaccatcataaacagtccatgcccgagggaacaatgcatgataggtcgagtgttgaccacttaaattccagtcccatgaagaaattccagagtcactatttttcttcagaccttcatgatgtccaggagccaaaactgatgagtatttcttattacccccgtctcgagatacaaatatagagaactggttctccatgaccggcgaactttcacaaagaccaggtatgatgtgccaattcttgaactctcccctgaaacctcttgaaatgcttccgctccccatcccaccaagtggcacaccctgggaagctgacggtttacagcgctctttagtgaacggatcgatcggtgctttccgtccatgtgacgcctcctcccgaacatacgaccatagtctcaggccaaggctcatcatcctcattgcctccatgaaagtgacactgaactccttgaggatgttcgcgtggctgttgagccgcctccgccacgcctgctccggcggcgccccgccatcgaaatccaacagctgcagcgcggtccggccgacgtactcctccgccggccacgagttcttccggcagtggaagatgtggccgctcaccatcgcgcccgctcgcctccgaagtgctagttgccgcttctcaccctcccccgcgcccgtggtcactgccgcagccccaccgacgcgatcctgccctcgccgcgcgccgccgatccggggtgcgcgccccctgggctcccgccaaaccagaagattcgcgggccggacgccctcatgcgcatcccccgcggcgaccgggctccccagcggtagccctccgcatcgccgcgccgcccccgcagatcgattcggcgccctctggatcggctggtcacgccgcggccggctggattggattggaccgaatccaaccagtgagtatgtatggctctccctgttcctcctcttctagtttttctcctcgcgggctggctgtcgccgcgctggtgtggtgcgctatggagtcgagaag

SEQ ID NO: 280 - DNA, 3590 bp, Zea mays
tgcagagctaccacaactccatggtacggaggctccgggagattaaggattgctggaagggccgtgaggggtacagccttgatgagaggctgaggatgttggacacgatgaaggcaaagcagcagcaccaacaacaacagcagagaaaagctctagatttcacgaggcgggctgggtcggagactgattcagagagcaggggatctggggaacaggtcttagctcgacccaagcacgataagagtaggcagaagaaggcagggaagttagtgaaggagaagtcgaaggggctgctgcgggtgggtacaccgaaaggagtggatgaggatgacatgggagggtctggccgtgatgctgtggtggcactctctgagctttctcgtcgagggtatgattctggcacatatagagggaagcttcacaggagcatagatggcctttactcggagttggaggaccttggatatgaaagggattcgtcaagacctcggtttccgaggctgcttcccaagccagtgaagaaggaattgtctacgagctgtgatgtcaatctgtatgcaaataactacagtgataaccatactgcatctccttactactacagcaggaatctcagtgctaatcagggagtcaccttagcagcagcatatgatcctccatattttgataccagaaggaatgcaaggtacttggagagagactgggtgcaaggtggaaaaggtgtgcacattaacgctttaatgggtgatgagatgaacttgccagctggtaatcacactggtaactcagatgactggcagaaggggcaatctgcaggtgattacaggagcaggaaagatcaagctggctatggtctgaaggttaagtcctataaaagtattgagaaagaggttaatgatgcccgtgttggttctgaccctagaagcaagatatcacaagcgaaggtggcaggtaaatccagtagacaactagataggactggccagaagcactccaggagcaatgctgtctatgctcaaagtgatgagacagaatctgattcctcggaaaagtttgaagatggcggggaagtgcattatcttgaacggaagccagagcgtcaccattctgggtattatagaccagcacatggtgccaaaaagccaaacaagcttgctaaagtggccaaaatgaactatcctactactgatgcagatttagaaccctcccagagcaaaggattcgaagggaagggttcagagactggctatttacgtgatgtggatgtgatggtgacagaacagattagtgatgtcatgaaacctccagcagcaagtggtgaaaggaagcggaaaggggcgggaaatctggacatgcatgtttatcataactctgatctgcatgaagtcaatgaagatgcaaatgactctttcaggttggcggaatatgaaaggcttgccagtagatcaggccatgcagtccaagattctaatggtggttatggtggtactgaaagaaccagctctagctccaaaaaagcaaaaggaagagtcgaagttcctagcctggatgagcatggtgagcatttgtcatctggcccaaaggttgttgagaacactggtggatccaagaagaaaagcaaaaagaagccagagagcagcaccacagatgcagttattttagcagaaccagctgttgctgtacctgaaaataatgtgatagctgcagagcctgagaaggttgagaagcccaagaagaagtatgtaccgataacaccaacgatccatactggtttttcattctctgttgtacatcttttaactgccgtaaagaaggctatggtcactcctgctgaagatactcctccagccacagcgacacaaccggatggagaggagggcaaaaagtggttcaacagtggagagcgcagcaaaacgccccatcaagaacaaagtgcaacagatcaaactgaacaggtccttgagggtgcaaatgccagtgctgtagaacagactgtaccaatcaatacaccagcgcttactgttcaagagattgtcaatcgaattagagcaaatcctggagatcctaggatacttgaaacacaggagcccctccaggatttagttcgaggagtattgaaagtactttcatctagaacagctcctctaggcgcaaagggctggaaagcactagttgcctatgagaagtcaaacaaaagttggttctgggttggtccagcaccttctgtttcatcatatgatgaccccgatgaagaaacctctgctgaagcatggagtataccacacaagatgctcgttaagttggtcgacgcattttctaattggctgaaaagtggtcaggaaacccttaagcagataggttccctcccaccacctccaccgccaaatcctgcaaacttggatctgaaggaaaggttcaaggagcttaaagcgcagaagagtctgaacacaataagcccgagctcagatgaagcgaggacatatttccagcgtgaggaatttctgaggtactcaatacctgatagagcattctgctacaccgctgctgacggggagaagtctatagttgcacccttgagaagaggaggtggaaagccaacagcgaaagcgaggggccaccccatgctcttaccggacaggccgccgcacgtcaccatcctgtgtctcgtaagggatgccgcgtctaggttgcctgcaaggactggaaccagagccgacgtctgcacactgctcagagattcacagtacctaaaccatgaagaagccaacaaagaggccgcaattaatcaagtcgtcagtggagctctcgaccgtctgcattacgagcgcgacccttgcgttctgtatgacaacgacaaaaagctgtggacctatctgcacaggggcagggaggaggaggatttcgaggacgacggcacgtcgtctacaaagaaatggaagaggccaaggagggatgtctccgatgctgcagagccaggtgcagcgaatgatgatatcgacgacgatggcgctggcacccctccatcaaacaatgtgaaaaaacagaagacaacattgtcaggagaagctgccaacgatgagggaaatcatccgactcagaatccggcttctggtggcctggaaggtgattctgatctcaatgctgttccgtcttcaaaattttttgaagaaccatgtggagatgcctacattgatgcaagaccagatgacggtggcccaaattcagtagatgcgaaaccgggcagcacagctgacgacaacacggcactccctgggaacaccggcatggacgctaccaccccaccatgaataaagaacgtatcatggttcaatcagctagagatttgctgaagggtcagcgtaggtaacttgtgcagaaaccgtatctcatctgcgttgttcttatcgctacagttggctagtattaggagagtttgattcatttttagtgttgcttctcttcccctcgaagctgacagtaatgtaaactagaaatgctaagatgggggtttttcagcatacctcgttctgttttatagtgaagttgccatgttataaaaaaaaaaaaaaaaaaaaaaaaaaaaaaaaaaa

SEQ ID NO: 281 - DNA, 591 bp, Zea mays
cctttttttgtgtaaatgtacattcaatcgttgtttgcattctcatgtatggatccagatgccgatgcttcacggtatgcaaccataggaggaaccaatttccaaaaagaaaaaaaaacatggaccaaaaatccctctacatcctagcagctgttccttgtgactgacatcttttcttcacacgatctcactgcactgtgggcagcttgctgtcggtaattaatatccatatcccggttggcatgtctgagcgtaagcgtagggatactgaggagaccaaacgaagcagtcgcgtccgaacccgccgctgctgttcctttgagcctgcttgtcagcagaagggtaaccccacgaaagttttatggctttacctcccagctgacttccattcagcattctaatggcttcctctgctgatgccctaaaagacgcaagtcagtcctgctgcctgttagagtacgtgacaaacccacagcccttccctggtaatgccttgacatcaacaagctccccatatggactaaaggcttgcatcagatcttcagaagtcacactttggtcaagttgcccaacaaatagctgcgaccaatt

SEQ ID NO: 282 - DNA, 1879 bp, Zea mays
aaaattgacagctagaaacatttccaaaatcttgagactccagtcagctgcccagctcgtcgatcgcagccagcaacagcaacagccagcaagctaagattcatcatggcttacgaaatctctcggcctccataaatcacccatcacaaacatgctctagcattagcattaccttgcccccgaaacgccagggcggccatcgaaacgcgagagccattcgaggataggtgtaggcagcagcggcaaggaacgcgagggcaacaagaaactgcggctagcgatggcggacacgccgtcgccgtcgccgacggcggccgccggggcggagccggggtccgcgtcgacgccgctgctgcggcggaggggctcgtacacacggaccgtgtcgcacgcgcgcgacgagctcagcagcttccgctccggcctgcggtggatgtgcgtcgaccactcggacgcctccagccccgccgtgtcctggctcgtcttcgccgcgctcggcgtggccgtccccgctgctgcgcacgcggcggcggcgccgcggcgcgcctacgacacgcaggtgcaggtctcgctcacgctctccgccgcgctggcctacaccaccctctactccctcgtccggcgccgcaggcctgcgccggctgctctacctcgaccgcctccgccacgactcgcaggacgtccgcgccgggtacatcgtccagctcgcggggtccttccgcctcctcgcctgcttcgtactcccctgcttcctcgccgacgccgcgtacaaggccttctggtactgcgccaaccgccccttcccgctctggtggtcggccgcggcgtgcgcgctggagatggcgtcgtggatgtaccgcaccgccatgttctgcatggcgtgcgtgctgttccgcaccatatgctacctgcagatcctccgaatgacggggttcgcgcgggacttcggccagtgcgccgacgtcgccgccgtgctgaggcagcaccggcgcatacgcgtccagctccagcggatcagccaccgctaccgaagcttcatactctactccctcatcctcgtcaccgccagccagttcactgcgcttctcgccgccaccagaccccacgcgcgagtcaacttcgccactgccggcgagctcgcgctctgctccatgagcctcgtcacgggactgctcgtctgcctccatagcgcggccaagatcacgcacaagacgcagtcgatcaccagcgtcgccgcggcgtggcacgccgacgccaccatcaacagcctggaccgtgaccaggagaaccccaggacgcccagcaaagcgtgcctgcagcagcaaacgcccacgagtcccttcccgatggcgggcgcgtcgtccggcgaagagtccgacgacgacgagtggcggagcgaggacggcgtggacacctcaaggttcacgcctttccacgccaccaacgtctccttccagaagaggcaggcgctagtgacgtacttggagaacaaccgggcggggatcacggtgttcggtttcgtcgtcgaccggacatggctacacgcgctgtttatgatcgagttctcgctggtaatgtggctgctagggaagacgatcggcatatcttgaggaggagatgcatttacttgtgaatgatacaaccaagaatttatcattctgccctttactgtaaaggtccaagtagattatgtcgttctaaatgtacaaatttgagctcagatagtagtttttttgtttgttgtttgtctgatccccaagaatatcgactctacaaaatttgccttttgacaatctgtttcgtggtacacacagttcaaaaaaaaaaaaaaaaaaaaaaaaaaaaaaaagtactctgcgttgttaccactgcttaagac

SEQ ID NO: 283 - DNA, 639 bp, Zea mays
agtatcccttataaggaatgcaacaagtgcccttgccagcccagaagagatgaatctcaaggaagtttttggttactggaacaacatactgcttcttaacagcagtgaaagatttccctccagctgcctttctaatgtcaaagttctgctccttgcgctctccctggacatagatatcgaaaaccctcctccctcggcttctccaagactgcatgtctggaaagtcaacctctgcaaattgaagtgtgaccgtgtaatttccattctcaagtccaatgccatagtatctcagagatgatggtgacatccttgctgtttggaacagtgcagagtctagggtgttctcgaactggcgtgaactgtagatgatgtaacttgcattgggtgcatctgcgtccaagaataacccaacgctgctaacggcccatgtaggtgcacccgcaacatagtatgatgcagcactaaggttggcattatcagcttgatagacggaattatctgaacctgatattgctctactaccaccacagtccaccgcaaaggacgcagactttggagaaccgaggaaacagggagtactatgctgaagacactccaatccccatggcaaaacactgttattggactatccatcacaaa

SEQ ID NO: 284 - DNA, 793 bp, Zea mays
ccacgcgtccggccggtcagcaggaggagcagcggcggcggcggagagaaggctgctaactggtggccggccgttcgccgcgagctccggcaccccgcagccggccggcacgcctccggtccggcggacggcagcagcagcatgtcttcggccgccccgctgctaggcggcgaggccggcggtggcgagcccgcgccgcggacgccgccgccgccgtcgtcgtgggtggggcgcgtggtggacgcggcggaggcgcgcgcgcagctggggttcgcggtgccgatggtgctgaccagcatggcctactacggcatcccgctggtgtcggtgatgttctcgggccagctcggcgacgtccacctcgccggcgccacgctcggcaactcctgggccaccgtcaccggctacgcgttcgtgaccggtctgagcggcgccctggagacgctgtgcgggcaggcgtacggcgcggggctgcaccgcatgctgggcctctacctgcagtcgtcgctcatcatgtcggccgccgcgtcggcgctcgtctccgcgctgtggtggttcacggagccggtgctcctgctcctgcggcaggagcccgaggcgtcccgcgccgcggcggcgttcgtccgcgcgcaggcgcctggcctcttcgccttctccttcgtgcagtgcctgctccgctacctgcagacgcagtccgtcgtgctcccgctcgtcgcctgctccgtggccccgttcgcgctccacgtcgcgctggcgcacctcatggtcaacgtgctcggcctgggcctcacgg

SEQ ID NO: 285 - DNA, 555 bp, Zea mays
gaccgattgacgcaggccaaaccttacctgagcgacggcgtggtgcaaggggtcgtggacccgcggctcggcgacggctacgacggcgggcagctgaggcggctcatgttcgtcgcgtccctctgcgtcagggccgccgccgtgtggcgcccgaccatgacacaggtggtggagctactggagtccggcgagatttctcaagagcagtggcagatgcccgaggaggaggagcaagacgagctgtgggacttcgacgatctcgacgacttcgacgaggacgactacgacgacgagtccgattccccctcgatctcctcgtcggcatgcagcatccaccccgatgattagccccaaaatacttgcgcgtgtcagtagattattatcgttgttattattcaacctgctgatacggtccttgattgtatcggtgtgtacatacaccatccatccctagtagagaatagtaatatgaaaatccgggagaaaatcgagagaagaggatagaggcccgtggctttctccaggcccgtgcccttcagttttggtgtcgccaaa

SEQ ID NO: 286 - DNA, 571 bp, Zea mays
atgatgccaaatgcggtcactaactctactaaagatgtcttggaggccgatgacacaactttcaataatgaatttccgatcaagttagatcagctcggtgatgatcctgttatttcccttggaaacatgcttgttgaacttatccagcacgaggattcttgttctggggattcaaatggcccgaccagtacatataagctgctcctactgaaggaaagcatttccaaggagattgaaaagactgaactcgagattgattcattggaaggcgaacttaaatctgtgaatactgaggctgcaactactcttgaaggttctcccacaggggtgacgcatacagaaaatctttcaccctctagtgggacatccaaggttcctggaagtgtggagatctgtgatacatctgatatgataaaagaaccaggggagctcattggttctcctaaggtacctgtggtgcagtatgatgatgtcaaaagtgctgatatgatggaaattgaaacagctccagttcataatgcaaaaacagttccttcagaagctggtgctatatctcctgtagtcgctgagg

SEQ ID NO: 287 - DNA, 2881 bp, Zea mays
gtaccgggccccctcttcgagttttttttttttttttttttttttttttttttttttttgacaaagacaaaatggtatatatatgccacacatgactcttgatcatgcttcagtatatgcatatacatcaggtctggtgcccactaagtagtaggaccccggttcctagtgcatgtttagataaccaaaggtttcatggtctctgcattagctgaaaaccgctgcatctaagagatagagatcagttgtttcttctttgcttgcaccaaataggttagtttctggaagaacactaagcataatgtttcagaccgaggcacggcagcagcagcagtgccatcagtcccaccccatcagcatgttggtgactgcatccacaatcttcttccgcagcgcagacgagagctcgtgctcctcaccgaagtgcaatctgtagacctcccactccctgccttccacaacgtgcctcccaatctcagccaagaagattcgtctctgaagattcttgagagcaagggtgatgtcgtagaacaccagcggcctacccttcccagaaacctcgaccgggttcgctaccagcagctccgtgtcaggacctcggttcaccaacgccacatggagtggtcggcggagctccatcctcaggcgacagcacagtgctctctgcctgtgctgatcaaggatcttcttcccgtccgactgcaccgcgaacagatcgatctcgcaccttccgttttggctcgcgtagaatcggccatatgaaatctgaatgttgcagtctttgactatcctcatgacatcatacaggaggcccttatggtcgccacactgaatctgaataagagtgtgggcagggctaagcgagttgtccatcgtcacggagatgatggtaccaccaccaccaccccttgtgccgatcggttgctcctccacgcgatcagctgtgctaaacatctgtgctataacagcaggcgtcagcgaagcccaggcccaggactggaggcagcaagacaccatgtcttcgccagcaggatctatttcgcaacatgtcaaggagtcgcctaagacgctctcgagtctgtcctgggtttcttctctcctgctctttgtgtgcagaagccccctggcatctgtgatgaagaaaaggtccagcacactcccatcaggcgtggtagagaccttcaccctccggatcgtgagctctagctcgcacagaacacgtgtcacatcatgcaagagtcccatccggtcgaagcagcatagcttgagcaagaagagctttggtgggggaggcgcaaggtcctgtaggccagccgctgcgaggtacgcgttgtcgaatccgaacggcggcgcgacggggcagagctgaagcaacctgtccttgagtaggtcccatggcacgggcaccggccgccccccgcgtggcagaacccagagcacgatgtagcaccaccgcccgtccgtgctcatgtctcccttgacgacgctgaggcggaagaggaggacgacccggcagaggtcgcagccgaggcccgtcttgtcggggcagctgacggtgacgacggtgggctcgccagcggcgtcggcgtggcggatttgcaccacgtcgtcgctgggtatccccatcggtcgatgtgatttgcaagggacgcaagcagctgctctagaaactagacatggatcctcccctcctgctaggctgccgcggtcgcgggggcggggacaaacagatagcggcggcggcggtcgaggtgcacggaatcttggcggatggattcgctagtctaagcgacaccccctccttggccctcgtctcgcccatcttcttggggggaaaaggaaagtcccggccgtcctcgagggtcccaatgccgcaaccaatcccaatatccgcaggcctccctctgcactggaccacaccacaccctcgcctttcccgcaacccagagcccctctgccaatctctgcacaacatcatcgattccccaggcgaaaaaaaatactctggaccctttttttcaatcagattttcaatcagaggagggtagattggatttgtcagattatccgatctccactgcagcctctctgaagagaagaggcccatccagtccagcctttccgcagttcctggagcaatcctggctcagtgcgtgaagcagcttgattcgcctgcgcaactgatagtcatagaagggagccaagagcttgttcttggctgcttgaccgattcttgattgagctgctgcggatcttgccaaagggccaagagcttgctgtgtctggaattcttggtcagccgtgccggatagggtgagggtgccatgacagcatcgcagtcctcgatgagcggcggcggggagccgggggtgcggacggtggtctggttcaggcgagacctgcgtgtggaggacaacccggcgctggcggcggccgctcggacggccggggaggtcgtgccggcgtacgtgtggtcgccagaggaggacgggccctactaccccggcagggtgtcccggtggtggctcagccaaagcctgaagcacctcgacgcctcgctccgccggctcggcgcctggcgcctcgtcacccgccgctccagcgacgctgtcgtcgcgctgatcgacctagtccgcagcaccggcgccacccacctcttttttcaaccgactctacgacccgctatcgctggtccgggaccaccgcgtgaaggagcagctgtcggcggagggcatcactgtgcagtccttcaacgccgatctgctgtacgagccgtgggaggtcctcgacgacgacggcttccccttcaccatgttcgcgccattctggaacaggtgcctgtgcatgccggaccctgccgcaccactgctgccgcccaaga

SEQ ID NO: 288 - DNA, 2054 bp, Zea mays
agccatctcgaggccggccgggcccaggctccgatatttgttttttccccacaaaacaccgccaccttttatagatccgatctccctctcttccccaattctccccgcctccccctccgaccctcccaaatcagcaccacccataggggccacggccgcgcaatgccgccctctgccgacgcaatgccggcccccggagacgccgcgtgcgccggcgacgtgcgcttgatctcctccaaggagctccgcgagcacgcgtccgccgccgacctctggatctccatctcgggcgacgtgtacgacgtgacgccctggcttccccaccacccgggcggcgacctcccgctcatcaccttggcggggcaggacgccaccgacgccttcgccgcctaccacccgccctcggcgcgcccgctcctccgccgcttcttcgtcggccgcctctccgactacaccgtctcccccgcgtccgccgactaccgccgcctcctggcgcagctctcctccgcgggcctcttcgagcgcgtcggccccacccccagggtccagctcgccctgatggccgtcctcttctacgcggcgctctacctcgtcctcgcctgcgccagcgcctcggcgcacatgctcgctggggggctcatcggcttcgtctggatccagtccggctggatgggccacgactcgggccaccaccgcatcacgggccatccgctcctggaccgcgtcgtgcaggtgctctccggaaactgcctcactggcctcagcatcgcctggtggaaatgcaaccacaacacgcaccacatcgcctgcaacagcctggaccatgacccggacctccagcacatgccgctcttcgctgtctcccccaagctgttcggcaacatatggtcctacttctaccagcggaccctggccttcgacgccgcctcgaaattcctcatcagctaccagcactggaccttctacccggtaatgtgcatcgccaggataaatcttctggcgcagtccgctgtcttcgtcctgaccgagaagagggtgccgcagcggctgcttgagatcgccggtgtcgccgcgttctgggcttggtacccgttgctggtggcgtgcctgccgaattggtgggagagggtggcgttcgtgcttctcagctttaccatctgcgggatccagcacgtccaattctgcctgaaccacttctcgtccgatgtgtacgtcgggccacccaagggcaacgactggttcgagaagcagacggcaggcacgctcgacatcctgtgccctccttggatggattggttccatggcggcctgcagttccagattgagcaccatctgttcccccgcctgcctcggtgccaccttcggaaggttgcgccggcggtgcgtgacctttgcaagaagcatgggctgacctattccgcagcctccttctgggacgcaaatgtgcttacatggaagacactcagggctgccgcattgcaggccaggagcgccacaggcggcggcggcgctccgaagaatttggtctgggaggcattgaacacccatggatgataaacgggacgaggatatggctgaggggaaggcaacttctggtgtttcagctttgtgccgacgcgattgtctggttgcttctaatctcagttgtttagattgtattggtcattgaacccgtccgagtcgggctggaatttttgtgttgacaagtgaccgtctatccagttgaagagttcatgcttcaattgtctgggttgttcgtcggctgttctattctgttcctcctatatcatggtaacgatatcgtgatccttgctctaagtcatggacctctgttttattaaggttatgtccattcgatttctcgctggcattgccaggattgtggatgcttttttatgttcatgatgttgtaagcttaatgaacggctggtaatgttatatgtagtaccaccaccccctgtaatctcagttgctgtggcagctttgactctctttggaatactagtatgtactccgtatatgacaatgatcaattcatccatattcctacagca

SEQ ID NO: 289 - DNA, 1662 bp, Zea mays
tgtcaatggacaagccctgcagtttgtttacgggagcaagcaagtctttacccaagggggcattctcgcggcgactgttgtcgacaaatctgtacaggagtcaacgtttcaaggaagcgatgaaggacgtcatgactcagtgctgcagtcctgatgaagtcatctttggtcctgacttccatcagtctttgtactgccatctattgtgtgggttaatctactcagacgagatccagtttgttttctcgccgtttgcgcacgagcctcgtccatgcatgtcacagtctcgaggaggtgtgggaagatctatgtgctgacataagagatggtgttctctcaaagagagtcaccgcaccatctatccgccaagctgtttcgaaaatcttgaggccgaatcctgagctggctagctcgatttacatcaagtgccagagcttgagcaattggtatggggtgatcccaacactgtggccaaacgtgaagtacatctatggcattatgacggggtccatggagccatacctgaagaaattgagacactatgctggtcacttgccgctgctgagtgctgactacggtgcatctgaaggatgggtcggctctaatgtaaacccaacgttgccacctgaggaggtgacttacgctgttcttcctaacattgcttatttcgagttcattcctctggaaaaaccaaaatgggaggaaacggagatctgttcctctgttcactacatagagtcggagcctgtaggcctaactgaggttgaggttggcaaaatctacgaagttgtaataacaaattttgcaggtctataccgatacagactgggagatattgtgaagatagcaggcttccgcaacgcaacaccagagctccagttcatctgccggagaagcctagtcctcagcgtcaacatcgacaagaacacagagaaagatctgcagctggccgtggaagccgcggagaagctcttggccgcggagaagctggaggtggtggacttcacgagcctcgtggacaggtcgagcgagccagggcactacgtcgtcttctgggagctgagctccgacgacggcgccagcgaagacgtcctgagcggctgcgcgagctgcatggacctggccttcgcggacgcggggtacgtcgggtcgaggaagacccagaccatcggcgccctcgagctccgggtcctccggaagggagccttcgcgcaggtcatgaaccactacctgagcctcggcggcgccgtcagccagttcaagacgccgcggttcgtgagccagtccaacagcaaggtgctgcagatactgagccggaacgtcacccggagctacttcagcactgcgtatgggctctgatcgacgatgctacggcgctacgcaccaagtactggtaggctgcaactggaagtatagtgatcgagagtgcatggcgcacgacgacgatccatcatgctggcagcctgggagttgcacgacggctgacagatgtatcatataactgtcggtgtaaatatagctgttcgacagtgtatgtaggcgaaggttgctgcgttccgtttagcagccgtgtcatcgctcaagaaaactcagaaagatcacatgtgttctgatttctgaatcaaaaaaaaaaaaaaaaaaaaaaaaaactcactcgatcaa

SEQ ID NO: 290 - DNA, 342 bp, Zea mays
gcctaggcaacaacaagctacctatagtgcaccggcagagcccatgctcgccgttgcacgggctgccgtccctaacggcggcagatgtcttgcgtcgtgacacctcccgcatccggcgccgcttcgcctcacaatcgtcgtccgtggtggcttctcttgcgtcggccctggccccggccccggcgccggcagccaccataatccccatagacggctcaccggacgcgggcgcactggactacaccgtgaacgtcggctatggcacgccggagcagcagttcccgatgttcctggacaccatcttcggcgtgtccctggtcttgtgcaagccgtgcgccccag

SEQ ID NO: 291 - DNA, 299 bp, Zea mays
cggacgcgtgggctcacgggcgctgcccgggttgcagctgtggaaggaggagtctgagagtaatctggggttcccaccattgtcggtattctcttcggctgatttccagaatgcagggtctgatagactctgctcttcgctagatggaaacatcgtcaggttgacctgggacagcaggacatcggctggcgagggcaggagcaggcgaaactcatctgagtcaataaggagcagaacatcggctggcgagcgcaggagcaggagaaattcatcggaatcactaaggagcagctggaaca

SEQ ID NO: 292 - DNA, 2341 bp, Zea mays
gaagcactcgagaccgatgatcgagctcacttcccgttaacttaccctattacctttctgctcgtggtgagtgctgacaccacctcacgcacacaagccgccggcggcgaccagaccgaccacctcgcgcactagccttgctcgcttctcgtcgccggctcgttgccggctcgtcggcacgatgtcgtcggagcctccacccgccccttctgccgccgcagcagagggactggctgctgacctttccgccgccaccctcagcaagaagcagcagaagaaggacgccaggaaggcggagaaggctgagaaggcggcgcagcgccagcaacagcagcagccggccgacgccgaggacccatttgcggccaactacggtgatgtccccgtcgaggagatccagtcaaaagccatttccggccgcttgtggtcccagatcggcgacctcgacgactcctctgcggggcgctctgtgcttatccgtggatccctgcaggctatccgcccggtcagcaagaagatggctttcgtcgtgctgcgccagagcatgagcaccgtgcagtgcgtgctcgttgccagcgccgacgccggcgtcagcacgcaaatggtgcgcttcgccaccgccttaagcaaggagtccatcgtcgacgttgagggcgtcgtgtccctccccaaggagcccctcaaggccaccacgcagcaagttgagattcaagtcaggaagatctattgcatcaatagggctatcccaacccttccaattaaccttgaagatgcagctcggagtgaggcagattttgagaaggctgaactggctggagaaaagcttgttcgtgttggtcaagatacccgcttgaactacagagctattgatctacgaacaccctcgaatcaagccatattccggatccagtgtcaagttgaaaacaaattcagagaatttctgttgtcaaaggactttgttgggatccacacgccaaaattgatttctggatccagtgaaggtggtgcagctgtattcaagcttctgtacaatggtcaacctgcttgcttggcacaatctcctcagttgcacaagcagatggctctatgtggtggttttgaacgagtatttgaggttggccctgtgtttagagcagaaaattcaaacacacacaggcatctctgtgagtttgttggtcttgatgctgaaatggagattaaggagcattattttgaggtctgtgacattatagatggcttatttgtatcaatatttaaacacttgactgaaaactgcaataaagaactcgagacgataaacaggcagtatccatttgaacctctgaagtatctagacaaaacattgaagctcacttatgaagaaggagttcaaatgttgaaggaagccggaacagaaattgagcctatgggtgacctcaatactgaagctgagaaaaaacttggtcggcttgtcagggaaaagtatgacacagattttttcattatgtatcgatatcctttggctgtgcgtcccttctacactatgccttgttatgacaacccagcttacagcaattcttttgatgtctttattcgaggcgaggagataatatctggagcgcaaaggatacacactcctgagctgttgaccaagcgtgcaacagagtgtggaatcgatgtcagcactatctcgacctacattgaagtcttcagctatggcgcgcctccgcatggtggtttcggggtgggtttggagagggtggtgatgctgttctgcgccctaaacaacatcaggaagacctcgatgttccctcgcgacccgcagaggcttgtgccgtaatttactgagtccaatgccctgagtttgcagcagagcgtactggttgttttgatgttctttgagcatcgaacatcgctaacttgcaatctcagctactgaagccccggttaccgtggttcagagttcctgttaaattcacaaagctacttgtatctattagattgctgaaaccagcaagtacgatcctttttgggatttgatctggtctaattgttgttaagtggaggtattgctctcagtttttttgtgctctgtttgtcggcatatgccaagagctagggcttcttaagttctaagtttttagacgagtggattccttttttttaagagccggcaaaagttctgccctgcacctgttaaaaatagatattaccctgttccaattctaaataatatgacgtgtcgccttctagatatttatattatgtagatgtacaatatgtctagatacagatagtaaagtaatgtatgtctttataaagagagaagaattgtgctgcgaaaaaaaaaaaaaaaaaaaaa

SEQ ID NO: 293 - DNA, 646 bp, Zea mays
ttgcggcacatcgttatggaatcaagagagtaattttacctgaaaggaacctgaaggacttatcagaggttccatcaccgattctctctggcatggagattctgcttgtgaaacacatcgaggacgtactcgaccatgctttcgaaggcggatgtccacttaaatcacgctccaagttatagcatccaactcgcctttgctatggatatttgcttcggaggatcatcgtcaacagtaccacgaatggtcaacagtcagaataagagcctagctctcttgccagcacaggtcttgacacgcccattttggttaggcttcgcatctgaatgtgtatactggtcagaattcggagagcagtcagaagatctgctcgttcacctgctgggactcattgcatagtttctcgacaccagctgttgatgtttatgcacagatgcaacagaaatcagggaggaattacgctggttggtttctctgtcgtgggtgtacatatgtatgtatgcatgtaatctaatccagggaaatatagctacaacaaggttgtcaaaactaaagacatcgaggaacatcacacgtccattgggcttgggtgactttattataaatgtatgtacatattcaaaaaaaaaaaaaaaaaaggccccta

SEQ ID NO: 294 - DNA, 828 bp, Zea mays
aaaagcaagagaaatcttcacatgatcgatgagaaacacgaccattagtcacatgattcatcactagctagctacaacgcgctaccatagcaacagcatgacgacgaccaacccaaccgcgatcctctccgtggtgctgctcatcgcgggcgtcgctgtgatgctcgtcgcccacatcctcgtcgttttctgggctctgctgcgggggctcggctcccgcggcagcagccagcacgccgccaaccaggaggaccgcgtagaggacggccgcggccggggactgtccagcggcgagctcgctacgcttccttgccatgagtacttcaaggctgccgcagacggagaagagaccggggactgcgcggtctgcctcgaggcgttcgaggccggtgaccggtgcaggcagctgccgcggtgcgagcacagcttccacgcggagtgcgtggactcgtggctcaggaagagcagcgcgtgccccgtgtgccgcgtcgacgctgtggaccggcggccgcccaagggcgaggcgaaggcggcggcggtctcaggggtcgtcgtggacatggcggggaggagaagctcgagacccgcactggagatcgtcattgaaagataggttgcctgcgtacggcccatggcagttgggaatcgggacggcgacaagctgcgttggggcaacacttgaaccactagattttgttgcttgtgcaagcatgtggacaccttcttttaagctgcacactcaactttcctttcatctgtcacatgaatgtaccttcgttatattgatgttacgctatgaaatgttgccatgcaaaaaaaaaaaaaaaa

SEQ ID NO: 295 - DNA, 415 bp, Zea mays
ggctgtggattctgcttcacctcccaatcctttgacatctgctccgaagcaaagtcagagcgctgcaatgcaaaacggaacgagtgggggcagcagcgcgagcaccgccgcgccggtgtccggacccaaagctgatcatccatcagctcctgtcaccaagagagaaatcgatgccagtgcggtgaagccagagcccgcaggtgatgatgctagaccggtggaaagcataggcatcgctgaaccggtggatgctaaggctgatgcagctccggctacagatgcggcggcgagtgctccttatgacagggaggataatgaacctggccctttggctgggcctaatgtgatgaacgtcgtcgtggtggcttctgaatgtgctcctttctgcaagacaggtaggttgcatttcaggggt

SEQ ID NO: 296 - DNA, 1428 bp, Zea mays
cgatcgatcgagatatcgtgtcaacgtgccggccggggcgtgggaagatgatgaacctatcggctgccgccaacggccgcgacgagttccccccctacgtcgtgccgtccaacgcggccgctccgcccccttccctgctcccaaccatggagcagcagcaggagagcagcatccacagggagcatcatcagctgctgggctacaacctcgaggccaactcgctggccctcctgcccccgtccaacgccgccgccgcccaccaccacaccaccttcgccggcggccacagcccccacgacatcctccacttctacacacctcctccttccgccgcctcgcactacctcgccgccgccgccggcaacccctacagccacttagtctccgcgcccgggaccaccttccaccagacctcgtcgtcctactacccgcccgcggcggcggcgcaggccgcgcccgagtactacttccccaccctcgtcagctccgccgaggagaacatggccagcttcgccgccacgcagctcggcctcaacctcggctaccgcacctacttcccgcccagaggaggctacacgtacggccaccacccgccgcgctgccaggccgagggctgcaaggccgacctctccagcgccaagcgataccaccgtcgccacaaggtgtgcgagcaccactccaaggcgcccgtcgtcgtcaccgccggtggactgcatcagaggttctgccagcagtgcagcagattccatctgctggatgagttcgacgatgctaagaagagctgcaggaaacgcctagcggaccacaaccgccgccgccggaagtcaaagccatcggatgctgatgccggagacaagaaaagggcacatgcgaacaaagcagctgcagctaaagacaaagcagagagtagcagcaagaacatggatatcggagatgggttaggcgcacagatactgggaagtgcactcttgtccaaggaacaagatcaaaccatggatcttggagaggtggtgaaagaagcagtggatcccaaggggaaggcatcaatgcaacagcattacggcttccccttccattcgtcgtcagcaggatcttgcttcccccagacccaagccgtctccagtgataccacatccaatataggtcaagtgcaagagccaagcttagggttccaccatcagcaccaccaacacagcaacatcttgcagctcggccaggctatgtttgatctcgacttcgatcactagtcaatatgtgatgcacatgcaccctctctttctcaccccaccccacccctcccctcccctctatcttgtttgtgcgcgtaatccgaatatttttcctttttaaattatctgtgttaattactgtaacgtggacataataatgatagtctatgcttgccatgcaatcatctatattatagtt

SEQ ID NO: 297 - DNA, 974 bp, Zea mays
aattcggcacgaggcaacatacatcgacatggcggttctcaacctcctcgccttgatcattgccacgctactgctacttttcagaagaacctccggcgccggcatttcgccggcggacacgctcaacagcgggggcaacgtcaccgatggcgagacgctggtctcggccggtggcacattcaccctgggcttcttctccccgtcgaccacggtgctgaccaagaggtacctcgggatctggttcacggcgtctggtacggacgccgtcttgtgggtggccaaccgcgaaaccccgctaaacaacacctccggcgtcctggtgatgagcagccgggtgggccttcgccttctcgacggctctggccggaccgcctggtcctcaaacacgaccggcgcccccacctcttcggtggcacagctgctcgggtccggcaacctcgtcgtgcgcgagaagagcagcaacgccgtcttccagtggcagtcgttcgaccatccgcagaacaccttgctcgccggcatgaggttcggcaagaacctaaagaccggcatggagtggtccctttgacgtcgtggcgggcgcaggacgaccccgcgacgggggactacccggtcgtgtcatggacacgaagggccttccggacatcgttacttggcacggcaacgccaagaagtaccgcgcgggtccgtggaacgggcgctggttcagcggcgtgccggagatggactcagggtacaagctgttctccgtccagatggtggacggcccggacgaggtcacctacgtgctcaacaccacggccggcatccccttcacccgcgtggtgctggacgaggttggcaaggtgcgggtcctgatgtggctgccgaccagccgggtgtggaaggaatacccatggctgccgcgcgacgcctgcgacgagtacacgtcctgcggcgcgttcggcctgtgcaacgtcgacgccgcgccgacagcc

SEQ ID NO: 298 - DNA, 357 bp, Zea mays
ctgatatttcttttattgttattttattgaagtctttgcggcgcatgaatcatcctaacattgtgaagctcaaagaggttatcagggaaaatgatatattatacttcataatggaatacatggagtgtaatctctatcaacttatgaaagaaagggtcaagcctttctccgagtctgaagtccgcaactggtgttttcagatatttcaggctcttgcatacatgcaccagaggggctactttcatcgtgacctcaaacctggtaggatctcagtcaactctgactaccagtctatataatattgcaatataggtagtgtagtaaactcacgtacaccttgtacatatccgccctcag

SEQ ID NO: 299 - DNA, 1039 bp, Zea mays
ctttgtaagtgtatgtatagctgaacatgttttcttttaccaggatttgacgctgcttctttgtacctctggtagagatcctggtataatacctcggaatactcatcctcctgaacctgaatccattgatgggatcaatgatacaggtgttcagactccacaacaatttcgtttgcctcgcacaaaggaagttgttgtaaatgggatcagtgtacgggtaaaatactgtgatacttgcatgttgtaccgaccacctcgatgctcacactgttccatttgcaataactgtgtggaacggtttgatcatcactgtccatgggtcggccagtgcataggactgcgtaattatcggttcttctatatgtttgtatcctcgacaacattgctctgcctgtatgtatttgccttctgttgggtgtatgtgatcaagattagagcagctgagcacttgtcaatttggaaggccttgttgaagacaccagcatcaattgttctgattatctactgttttctttgtgtatggtttgtgggtggtttatctgtcttccatttgtacctgatgggcactaaccagacaacatacgagaatttcaggtatcgctatgaccggcgcgataatccatataacagaggtactctgaacaattttctagagatattctgcaccgctatccccccttcgaagaacaatttccgggcaagggtgacagtagagcaagggctgcagcaaacgcgctcacagtctaggggtttcatgagccccagcatgggcaagccaaccatcggagagcttgagatgggcaggaagccagtagtaccttgggacgagccaaggacggcagctgatatcagggacttggaagcaggccacgcatccccagatctgagcagagatctcccagcagagtttgtggaagggcgaactggcatgcactcgaggcagtcaagtgatttacaacaaaagcttcacaagagaaaaaactcacaacgttctttcatctctattgatccaactttccggctatcaacaaacctacag

SEQ ID NO: 300 - DNA, 922 bp, Zea mays
ttttcgagtatagcgtctgtttcgcaccaaccgaatagtcacagaaaattccgtttgcccaaacctagagctacctccgccgccgccgccggcaatcaagacagctgatggatcctatgcagtcatcggtgagaggccgcaggtcttcgttgcatgctgatgctgtcataactattggaggagtccgacctgcaccacccccacaaacatccacacaacatgtatgtcaagatgaggcaatggtcagcagcggggatccctcttggatgtctggttacagcactgattcctgccggggtggttattacacttctgcactcaacctggagggtgcatcaattagagaactgaagctgaaatatcagaagctgaaatatcggaataaacctaacaattgtaatgcggacgatcatgtcaatgctgaaagatcacccggaagaaaagctgaggagaaaaaagtgctggcgagaaagcatgaagattgtgatgatgaccctttcattgaagaagttaaaaagatgagagaagcacatcaagaaatagagagagatcgaaaggcccgtgatgataagttctatgagctagagaagattaagcttgacttgaagcgagaccgactggatacaatgataatgcaaactgacacgagcgcaatggacagtgaagcaagaacaatactttaagctgatgaaagaagagattttggctcgtcgattcaagagtaggaaagcataggtgtttccatttaatggattttagactgaagttgtttttcgttctttttaatggagttagtatttggtttgtatcttcaataatgctataatacttgtggatgctctgcattagggccagaaaaaaagctcgagctggctcgggctcgtagcagttcggcccgaaaaaaaaaaaaaaaaaagcggcc

SEQ ID NO: 301 - DNA, 2975 bp, Zea mays
atataatgcgttattatcctccaccagagagagccgacgatgtccatccatgtaggcatgtagctgcagcctgcaggccccggcctctctacacacacccgtagcggagatcatgagcagcgcgcgccaagccatcaccccgtggccaagcttaaagaaacctcaccatgtgtccctcggtccctcccggtttaaggatgccgtcaattgtttagaaaccacacggctgtccctgtcgctggctaagtggttggagtgctgactagttagtgccagattagacgggcaagccatcagcagccaatgcctccgtgctgttgttgttgttgttgcatgttgttgtccattatttagctgctttgcgcgcgtgcagacaccgagctacctataggccataggctatagcaagctccgccgtcgccattgctacacaccaatctttcctgccgcggtgccgcctctcgtccatggcaaagggagcgggagctagctgacggccgcgcgctttcgtcttttgtcctttaatttcgcagcattccgcgcgcttggtctctcggaggcgtggcggtagcctgtgccggtgtgcctcggagctccggcctccgggaataaacataggggtatcgccatgcaggcggccgggactacactctgcccggccttttgatcccctcccgcccgtgctcgcctacgcggcggagattatgttaagctaatgctcctatcccagttcggcctcggagttgctcttgctcctcccctccacttcctgtcggcctcttgcgctttccggcctcggattctttgtgtgcccaccattgcatctagctgcggcttctctccttcgctctgcatctgagtcgagcactcgagctggagcatcgatccgcctcgtccttccagacgcggcttcagctagaatccatcgctctttttttagttcggtttccatttcccatcagagcttccaaccggttctactcgatttggatttttggagctggagtctcccagagcaaaacttcccctccccttccctcctcctccccccttgcatttgacatgaggaggagaagagacgctgcaatctcccccatgttataaggctaaggcatgctgtcgttgaacaaaatgcatttcctcaagttatattccagcaccagcagcaacagcaacagcttcaggaatggctcctcggaacaccccgcccggacgtcctcccagggcagcaacaaggccgggcggacggcgaggatggccgagtctcccaccggcctcagccccaaggtggaccgccgcacggcggtgagcgccgagagagagaaaaggaggccaccgacgacgaagctgtcggagctggagtcccagctgtcgcagctgcaagaggagctcaagaaggccagggagcaactacactcctctgaactctccaggaaagcgggccctgcaggaggccgacgacgccaagggcgcaggccgccgcggcgtccgcgcaggcgcgcgacaccgaggctcagctcgccgagctctcgtcggccgaggagtcccgcctcctggagctgcgtcgtctgtcgcaggagcgcgaccgctcgtggcagtcggagctggaggccatgcagaagcagcacgccgcggactcgaccgcgcttgccgcggcgatgggcgaggtgcaccgcctccgcgtccagctcgccgccacggcgcgcgccgaccgccggcaggacgtggtggaggcgctggccaccatcaacgagctcagggccaagctcaaggcaagcgaggaggccgaggcgcaggcgcgcgcgatgcacgaggagtgcaagcagcagctggaggcgagccgggccaccatcgattcgctgctcaccgacgggtccaagctgatggactcgttcagcctcgtggtgaaggagctcgaggagtcgcgtgccacggtcaaggctcttgaggacgagatcgcggagacgtcgtcgagggccgcaggcgaccactgcagctgctcgggctcggagtcagaggcctccgagctgagggcggagctagaggccgcggaggccaggtaccaagaagagaagatccttagcactgtcgagacgcagtgcgcgtacgagctcatggaccagataaagacagagtccgacctgcggcacggcaagctcgcggcggcgctcgagggcgccaagtccgaggtcatcttcctcaaggcgagtctgttcgacaaggaatccgagctacgtagtgccctggacgcgatcaagaagctacaagcggagacgagagcagacggctcggccgacgcgctgaagcagcagctgcagtgcgcgctgcacgagaacgggcagctgaagcaggagttgcaccagtacgagtccgagaagggctccgcgaccgcgaggacggcggaggccgacgcgtcggaagcggcgaagaagggtgagatggaaaccgagctgcgccgcctgcgggtacaggccgagcagtggcggaaggccgcggagacagccatggcgctgctgacggttggcaagggcgggaacggcaagttcgtggagcggagcgagtcgtgggagggcgttaagtacgcgggcctctgcgaggaattggacgacgacgcggctgtcaggaagaacggcaacgtgctcaggaggatcagcggcatgtggaagaaatgagtgcgatcgggcagctgagcggcggacgcggcgagggctgtactgatctgtagccttgggtctctctggtgtaattgttttttttaaaaggaggatgaccctatggttttagaaaaagaaaggtaacaaatataatacatgagttgccagtctcgccgcggcaacggttttactgctctctagggagccatgggtttcttaactctctctgctgtaattgtttagttttgcaggttcttgtggtgtaaaaattaaatgaaacgtgctcatagctgtattatacaaggtggtacatggaggaac

SEQ ID NO: 302 - DNA, 2341 bp, Zea mays
gccggctctccaggcgaagcccgagctgcgagagctcccctctccctgtctcctcgtctgtgactgtgcgccgccatcgcccgtcgaccagcgccgtccgcccgctcgaaaactgagacgcacgctgcccgcgcatcgccgtggcctgctccagtctgtggaaaagtgacgaaccaactcggggaattctactctcgaggccgccacctccgcctccgcctccagccctccaccgactactgtctggaactggaagtgtaccactactattcaattggccctagccctcgcatagcacgatgccgccgccgctgcttgagttcgcgatcctcgccactgcctgcaggttcagcaagccccttaccgttctcaggaggcttggcgttcttggcccaccaaccgttcgacgcaatgccgcagaggcgttcgtgccttcaccgtttcgccaggttgtcgttcagagtggaaagcttcttgggacaccaaggttctgccacaccactgccggcatgtcagaatgtctcccggacgtctacgccagtcaggtactgaaggttctcaagtccaccagtgctgacaacacggatctcagcggtgctcttcatcagttcgcggtccacatggatgaggatattatcctcatggtcctccagaagcagcggtccaactggcaggtcgccctggcattcttcaactgggcggcaaccctgccggggtatgcccacgggtcaagggcctacaccgagatgctggacattcttgggcggatgaagaaggtcagacacatgaggcagctgtttgacgagattcctgaggagcgacgtcaggtggtcgtgacgaataagatgtttgccgtgctgttgaaccggtacgctggtgcgcacaaggtgcaggaggcgatagaggtgttctacttgaggaaggattacgggtttgagcttgacttggtcgggttccagatactactgatgtcgctgtgcaggtataagcatgtcgaggaggcggaggcgctgttccgtgagaagaaagatgagttcccgcatgtcacaaagagctggaacattatactaaatggttggtgtgtcaagggaagcctgagggacgctcaaaggatttggaatgatatcattgcatctaaggttgaacgagacctattcacctttggtacgttcataaacgcattggccaaaaatggcagaattagtgccgcggtgaagctgttcaaacagatgtgggagaaagggatcaatcctgatgttgcgatttgcaattgtatcatcgaccagctgtgcttcaagaaaaagattccagaagcacttgagatttttggtgagatgaatgaccggctttgtcaagccgatgtggctacctacaacactttgataaaatacatgtgtaagataaaaaggatggagaaagtttatgaacttttggatgacatggaagcaaagggctgccctccaaacaataggacatactcctacattctgaagacgactgagaaacccaaagatgtcattgccttgatgcagaggatggagcgaaccggctgcaaattggattctgatatatacaacttgatattgaacctttatatcaaatggaaatatgagaaggggatgcaacagatatgggatgagatggagagaagagggtcaggcccagatcagcggtcgtttactattatggttcatggtcttcattcccaaggcaagctcgatgaggctctgcagtattacacaacaatgaagtctagagggatgattccagaacctaggaccaagatactggtgaaagctatgcacatgaagaaggacggggctgccactgaagatgactcggcaagtatggcagggaagcatctaaaattggatcatcgttcaagactattcaatgttcatagatagtctgcttccaggtctttgttctataatctgagcaggggatgctgtccatataggtttatgggttgaaagaaagaaaaacagttcttttttctatgggtgtctaaatcacaatggctgcaccttgggctaaaaagaatcatcagcatagattcattggcaatatgatttctcagtaacttttgctcagactttcagtgccaggatcatcagtcagctgtgaaaacgttttcctagcaggtgaaattgggagttcaaggtgcgtaccgatatccaaatttatttaatgtgttgcgcaagaaacaaacaaatgtggtgggagcacttaaattctacaccttttaatgtggaatggcaaagttttatttattagattaaacaaggatatggatatttttatctagaacctaaataaaaacggcttgttctctaaaaaa

SEQ ID NO: 303 - DNA, 292 bp, Zea mays
gaaaaggtgatttccttgattgttagtatctacctgtattttccctcctttttgcagtgcaggttataatactatttggcttccctctattgccaacctcactacaaaatttcctctttttgtttttttggtacaaagcactttttaattgattcatgtgccagaaaaatgttttttatctacaggactatggtgcctatgagaaaaagcagtccttgtcgaatattcatcagcaggaatccagtcttcagtcaagctttaccgcagtcaaggataacactagtgcaacaat

SEQ ID NO: 304 - DNA, 3916 bp, Zea mays
cccacgcgtccgcggacgcgcagtgtgcgctcactccttagctgttcggctcgggccgtcaccttgcgtgcgcgacatctagggcgaccgccgccgccgccgccgccctacgcccagcaccccaggtcttcgtcgcgccctttgccggctacgagcacccaccacaccagatcactgtaatccacgctgaattgtggctgaacctggtggcatattaatctcggatacttggtcaactgcaaacttcaagattcattctcatgcaatcaatggagagcctagcgcaattagaggtgttgtgtgaaaagctttataattctagagactcggctcagcgagcgcatgcagaaagcaccctcaagtgcttctcagagaacagcgagtacatttcgcagtgccaatacatattggacaatgcctcaactccatatgccctgatgctggcgagttcaagcttgctgaagcaagtttctgaccgcagtctttctttgatgctccgtctcgatatacggaattatgtcataaactatcttggcacaagggggcctaaattgcagaactttgtcattgtgtccttaattcagctggtctgtcgaattacaaaatttggatggtttgatgatgacagattcagagagactgtcaaggaagcgactgattttttaggtcttgcttcccaggatcattatttcataggcttgaagatactaaacaatctcgttacagaaatgaatcagccaaaccccgcgatgcctttgacgcttcataggaaaattgcgggttcattcaaggatcagtttcttctgcagatcttccaaatttcgttaacctcactaaaccaactgaagagtgaagctccggatgactttggacatattcctcttgaccttgccttgaagtgcttatcttttgactttgttggttctccggtggacgaaagctctgaagaatttggaacagtgcagcttcctgcatcttggaggcctcttcttcaagatccttccacactccaaatcttttttgattactacaaagtcaatgacatacgggtttcaaaagaggccttggagtgtctggttcgacttgcttctgtcaggcgcagtatttttgtggaggatcctgcaaggtcccagtttctttctcatctgatgctaggcaccaaggagatacttctaactggccaaggacttgctgatcatgacaattaccatgagttctgccgtctttgggacgtttcaaagtgaattaccagctggcagagcttttgaatgttgagttttatggtgagtggattggtctagtagctgaatttacaactagatccttgttgtcatggcagtgggccagcaacagtgtctactaccttctaagtctttggtcaaggctggtgacatccgtgccttacttgaaaggtgaaacaccaagtcttcttgatgaaactgttcccaagatcacagaaggttttatcacttccagaattaattctgttcaggccatccttgctgacaactcactggaaaatcctttggatagtgtggaagttctccaggaccagctggagtttcttcctttcctttgcagattccagtaccaaagtagtagtctgtacatcataaacatcatggaacctcttctgcaagcttatacggaaaggtccagattacccgctcctggtgatgctgatgagctgtctgtcattgaaggccaaattgcatggatggttcacataattgcggccattgtcaaagttaggcaggtaacaggtgttagtcaagaaacacaagagttgattgacgcagaactctctgcccgtgtactacagttgataagtgtgactgatacaggagcgcacacacagagatatcaagaattaagtaagcaaaggcttgaccgagctattctcatttttgtacaaagtttcagaaggtcatatgtaggagaccaagctatgcattcttcaaagttgtatggaagattgtctgagcttctaggacttaatgaccatttaattctactcaatgtgattgttggcaaaattgctacaaatatgaagtgctatgctgagagtgaggatgttattgatcatactctgtccctgttccttgacttggcaactggctatatgactggaaagctgctgcttaagctggagagtgtaaaattcatcattgcaaatcattctccagagaatttcccatttcttgcagaatacaaatgttcacgtagtagaactacgttctattacatccttggctccttagtcttcatggaagatagccctgtgaaattcaggactttcatggaaccacttcaacaggttgcattaaacctggaggcaactcctgatgctgcttttcggactgatgtcgctaagcgtgcatttgttggttggatgagagatctacgtggcatagctatggcaaccaacagccgcaagacatatggcctcctatttgactggttgtatccatctcgcatgccacttctgctgagagccatctcactttgcactgatgaaccagaggtcaccacacccttgctcaagttcacgtatgaatttgttttgaacaaagctcaaagactgacatttgattcatcatcaccaaatgggatccttttattccgagaggttagcaagataatcgtggcttacgggtcacgaattctattgcttcctaatggcacagacatttatggaagtaaatacaaaggcatatggatctcactgactgttctttcaagggctttgtgtgggaattatgtcaattttggcgtatttgagctctatggtgacagagcacttgctgatgcccttgatatatctctgaagatgaccctctcagttccattatctgatatattggcattcaaaaagctgtcgaaagcgtactttgggtatatggaagttctgttcaacaaccatatcaagtttgttctcaatttggacacaaacacattcatacatattgtcagctcactcgaatctggcttaaaaggtctagatgcagggatatcatcacagtgcgcttctgccatcgacaacctggcagccttttactttaataacattacatctggtgactcacctccatcaccagcttcagtaaatctcgcacgacatattggagagtgtcccaatttgtttcctcagatactgaagactctttttgagatcatgctctttgaggatgctggtaatcagtggagtctgagtcgaccaatactgagcctgataatgaccagtgaacagatgttcagtgaactcagagcgcacatattagcatcacagactgtggaccagcaacaacgcctttcacagtgcttcgataagctgatgacggatgtcaataggaacttggaacctaagaatcgtgacagattcactcaaaacctgacagcatttagacgtgattttcgactgaagtaacagctccttggtaccagctatcagtttgaaggtgttcctgcatgatgtaaatactccagttaccttcttttttggaaccacctttctgtgggttgagaaaagaagagcttgtccttaggtttgccttggattggctgaagatggtcttgttgatgcatgtggtagtgaaagcagctgtaaatttcatagcatgtcattttaatcagaatggtgaaaggtggagattgtttcttttgttttttattttatattgcatccctttagcatgtacagcaaaattggtgctagaacaggggtggctgtttgcccaatttgttaagtgggaggcagtcatctcagatataattcatttgttaagaagtcaacgaggtaaaggatgtaaatgattccgttggctttgctgaatatgaaagttgaacagtaagaaggatggctcagttgcatccgctgtgcagattgaactgttaatgataacaattcctttttttt

SEQ ID NO: 305 - DNA, 1859 bp, Zea mays
cattggggacctcggaggcaggccggggccggtggaaactagtcaagttccgtttccatacttccggcgcggcggagatcgaatcgagcgcccgccacggcgatggcgactagagtcctgccaccggctctgctctctttcatactcctgctgctgctctcgctctcagcccgcgacaccgtcgccgcgggcgaggatttcccacgcgacgggcgggtgatcgacctcgacgacagcaatttcgaggcggcgctgggcgccatcgactttctcttcgtcgacttctacgccccttggtgcggccactgcaagagacttgcgcccgagttagatgaagctgcaccggtgttgtcagggttgagtgagcctattgttgttgccaaagtcaacgctgataaatacagaaaacttggatcaaaatatggagtggatgggttccctaccctcatgctttttatccatggtgttccaattgaatacactggttctaggaaagctgaccagcttgtccgcaatctgaagaagttcgtttcgccagatgtttctatccttgagtcagattctgcgataaagaactttgttgagaatgctgggataagctttccgatattccttggttttggggtgaatgactcattgattgctgagtatggaaggaaatacaagaaaagagcctggtttgctgttgctaaagatttctctgaggacatcatggtagcctatgaatttgataaggttccagcactagttgctatccatccaaagtataaggaacagagtttgttctatggcccatttgaagaaaatttcttagaagattttgtacggcaatcccttctccctttgggttgtcccaatcaatacagagacactaaaaatgctgaatgatgatcagaggaaagttgttctcacaattttggaggatgattcagatgaaaactctacgcaactggtaaagattttgcgatctgctgctaatgcaaaccgtgatttggtgtttggatatgttggaatcaagcaatgggatgggtttgtggagacttttgatgtttccaagagctcacagctgccaaagctacttgtgtgggatagagatgaggagtatgagctagtggatggttcagagagattagaagaaggcgaccaagcatctcaaataagccaattccttgagggatacagagcaggaagaacaacaaagaagaaaatcaccggcccttctttcatgggtttcctgaactctctggtcagcctgaactcgctgtacatccttatatttgtcatcgcccttctgtttgtcatggtgtactttgctggacaagatgatactcctcagccaagacgaattcacgaagagtgatgaaagcttgttgggtttcttgcacctaaagatggctaatctaccgggagattagcttttgtattaattgtacaaaagcttcaactgacgcaagtcgtgaagagtggttttggcaatttggccattcatgctgagtttcttcaatctctattggcgacatcaatttctgcatcctgcctatttgtgtttctgctttgtgcccttcaatttgttctttaatttagagcttagaaattagcctctgcctgtgtattctgggacctgccattccagagtccatttctgtgaaaatatatttattattatcatactctgctaccgagcttttgtacaattaatacaggatatatagactgttctggtgctctaaaaaaaaaacaagaagtaaagagtggttttggcaatttggccattcatgctgagttatgttactcgctaccgagcttttgtacaattaatacaggatatatagactgttctaaaaaaaaaaaaaaaaaaa

SEQ ID NO: 306 - DNA, 1460 bp, Zea mays
cattgggtacctcgaggccggccgattctcggcccacctcgagttgacaagctcacaaaaggccacgcggacacaggagaggggagagcccgagagcttcccttgccggcgagatccagtccggctcacgcgatctgactttcccggagcagatccaggttaagcagatggctgacaacagcattgagcaagcattgatagagaatcctcctaatgtgctgaaatggaagccatcagaaagagctaaacggtttcgacgatgcaggtcaactccctcagatcccaccgatcaaaaacctgcagaaaacggatctgtgcttaaagccaaagagttattcaaggagaaaaggccgagcttcatgcttgtaggcctcctccttttcgcctacctactagtgggtgtcatcatcttttacctattcatggatcaattatctgggaagacaactaatagagtgcttgacgccttgtacttcgttattgtcacaatgacctcggttggctatggggatcttttcccaaacagtgacacaacaaagctgcttgcttgcgcttttgtattcacaggaatggcgatcattgctctcttcatcagcaaagcggcagattaccttgttgagaaacaggaggtgttgttcttcaaagcactgcacatgaatatgaagggcagcgaggccaaaatgctaggagcaatggaaacaaataggataaagtacaaattctacactgtcgctctgcttcttgcaatggttattgatgctgggactgtatttctgtggaaggttgagaagctcagccttgttgattccttctactgtgtctgtgccacgatcactaccctgggttatggggataaaagcttctcgtccaaactggggcgtgtttttgcagtgttttggataaccacaagtactctcatcatggctcagttcttcatgtaccttgctgagctctacactgagcgccggcagaaaatcctgaccaaatgggtggtcaataggaggataaccaccatggatcttgaggcagctgatatagatgacgaccgacaagttggtgctgctgaatttgtactttacaagctaaaagagctcggcaagatcagccaagaggagatatcttgttttctcgaggagtttgacaagcttgatgttgaccagtctggcacactctcaacttacgaccttactctaggacaaacaattcaatgactgatgatgcatatgtgattttgctgactgaatgattttgtttgatgtcgttagcatttctgttgtccatatgtaacgctgtaatgttgtaaagatgtaaattgagatgattgagaaattgtgccccgccttttctccaaagcaacttgaatcaaggctgtaaagaacaaatacttgctggagacagacgacatacctgcaaatttatgattggcttagctcaaaaaaaaaaaaaaaaaaaaaaaaaaa

SEQ ID NO: 307 - DNA, 268 bp, Zea mays
ctggtttcttattggctacggcgggtggcggcgggggcgtcggagatggtcgactgcggctcggccggagcgccgggtggccagggaggcggacggcggcgaattcgcagctcgtcatgttcatggggtgcatgcgcgcgtttcggcgcggagcaattcaagaagtgagcagggatttaggaggaggaatggttgaagataatctgaaggcgtccgcaaccccccttccggcgtgcgggttgctgttggcgaggacacaggcggtcca

SEQ ID NO: 308 - DNA, 1578 bp, Zea mays
ctcaaatggagtttttgaggtatctctccataaccttcaagtgaactcatcgtggaaacgttttctgaatcactctttttttcattgtggaaacatcttctgaattacacactgttctgatttgattctatgtattgctactcaggtcaaagcaacaaatggtgatactttcttgggtggtgaagattttgataatacactattggagttcttggtgagtgatttcaagaaaactgagggcatagatctgtcgaaagatagattggccctgcaaaggcttcgtgaagctgctgagaaggcaaaggttgaactttcgtcgacttctcagacagaaatcaatctgccattcataacagctgatgcttcaggggcaaaacatttgaacatcacactgacaaggtcaaaatttgaatctcttgtacacgatctgattgagagaactagagatccatgcaagaactgtttgaaggatgccggaatatctactaaagaggtggatgaagtacttcttgttggtggaatgactagggttccaaaggtgcaggaggtagtctctgaaatctttgggaagaacccaagcaaaggagtcaatccagatgaagctgtggccatgggtgctgcacttcagggtggcattctccgtggagatgttaaggagcttcttcttcttgatgttactcccctgtcactaggtattgagacgctcggtggtatcttcaccagattgatcaacagaaacactacaatccccacaaagaaaagtcaggtgttctcaactgctgctgacaaccagacccaagtgggtatccgggtgttgcaaggtgagcgtgaaatggctacagacaacaagctccttggtgaatttgacctcgtgggcattccacctgccccaagaggcttgcctcagattgaggttacattcgacatcgatgccaatggaattgtgaccgtctcagccaaagataaggctaccgggaaggagcagaacatcaccatacgatcctcgggtgggctgtcagaggctgacatccagaagatggtgcaagaagctgagctgcatgcccagaaggaccaggagcggaaagccctcattgacatcaggaacaatgccgacaccactatctacagcatcgagaagagtcttggagagtacagggacaagatcccggcagaggttgcatctgagatcgaggcagccatcgctgacctccgccaggagatggcctcggatgacattgagaagatcaaggccaagcttgaggctgccaacaaggctgtctcgaagattggacagcacatgtctggtggtggctctggcggctcgcagtcaggatctggacctcagggtggcggcgaccaggcgccggaggcagagtatgaggaggttaagaagtgaggctgcgggagttcaagggaattgtagcggcttgtttagaagtagctcgtttttttttttgggaacgcagatagtcagatgtctcagatgaggtgtaacctgtgttgcaataatctatgaacttacccctaaaaaaaaaaaaaaaaaaaaaaaaaaaagaaaaaaaaaaaaaaaaagcggcc

SEQ ID NO: 309 - DNA, 763 bp, Zea mays
agtaattaattgaggtcaagcacacccgtccaattgcgatcactggcaggcgcgagagacgaacggtgtgttgtgttggtctgtcttgtcaccgccgactgtttctatctagtctagctacaactgctgcttttctcgcttgtcaggccagcccaatcgtcgttggcgcggcgccagcagaagcggcgtcatatgcagcgaaatcattgatgccgatgccgatgccgatgccatcatgcatgccgcttgccgcctgcaagctgcaaaccctgcatgctaatcagtttgctttgctctcaggcatcacgcagactggcagcgtagatgaaccccctgctgctggctgccgcagacaagatggatccatacgaatgaatacaacagctgctacactactattccctggcaaacgcattgcagccgcagtactgctcctttggagcttccctgtcttgatcgggtggcgtcactcgttccatacttccatgggctgctagctgaacgctagccgacgatcacgactagacctggtggtgctcctgatctgtactgtacttcttttttgagcgaaccaacaaagcggcgagaagctctccaaaataaagccgctcgacgtacgcgacagcaacgtgtgccccctcgccgcacatctgcgtccaccaccgcatagcatcatcagtcggcatcatcattggatcgaactccaaagctagcactgcaggatgtacacatatatatataaacatcgtgagggagttggttg

SEQ ID NO: 310 - DNA, 428 bp, Zea mays
cccacggcgactgcctcactcccccgcatggcgagcccgacgacccgtcgccgtgcggccactgggtggcgcggctgcaggcactccacgacctgtccgtgtccggcgagcagcagcagggcggcgggttcggggagtgctggggcgccgtgatggggctgagctcgtgctacggcgagatcctgctcttcttcgtcaacggcgagtcgtacatcgggcccgactgctgcgtcgccatccgcggcgccacgcgctactgctggcccgccatgctcgcctccgtcggcttcaccggcgaggaggccgacgtgctgcgcggcttctgcgacggcgaggaggcggaggccacccgcgcgccgccgcctgctgtgcccgctcctgccgcccggggactgggccagctggctgccgtagccgtgagggggtga

SEQ ID NO: 311 - DNA, 127 bp, Zea mays
catgcctgcagctgcacgtggttcctgtgacgaccgcctcaagtcaagtgggatgggagctccaacgttttccatttgccacacagctagtggaggcgagtttggcgtgtgtgctatgccgatgcca

SEQ ID NO: 312 - DNA, 1516 bp, Zea mays
ggttcgtgcctctctatctcccacctttcattccccgcgcagtcgtcctccccaccccacccaccccaccccacccggcccccactttccactcccaaccccaccagaccttcaaccgctacatttccgtcactaccggagccgccactcccacgaacgcgggcggcggaacggaagcgaaccagttatctagtggagttgcctccttcaagctactctaatgtcctttctattcaagtctagcaatggcggcaccactgaaaaaatcccatccccagaagaacagcgagaaaaaataaatgaattacgcaaggagcttggtgaacactcatcagcagccattaaagacttcctttcagatgcctcgttagcgagatttcttcgagcaaggaactggaatgtgcagaaagctagtaaaatgatgaaagcagctgtgaagtggcgggggggggcttgcattcaaacctgaaaacatctgttgggatgatattgcagaggaagcagagactggaaagatatatagagcggattataaggacaaacatggcagaactgttcttgtattgaggcctggcttagagaacactacctcagcaataggacagatcaaatatctagtctactctctggagaaagcaattatgaacctgacggaagatcaagagaagatggtatggctgacagatttccagtgctggacattgggaagcacaccactgaaggtgacccgtgagactgtcaatgtcttgcaagactgctatcctgagaggttggggcttgcaatcctttacaaccctcctaggatatttgaatcattctggaagatagtgaagccgttcctagaccatgagacccgcaagaaggtgaagtttgtgtactccaacgacaaggagagccagaagataatggcagaagtctttgacatggaggagctcgactcggcattcgggggaaagaacccagcgacatttgagtacaacagctacgcagagcagatgcaggacgacgacaagaagatgggatcttcgcacggctcagccaatagcttgcttggatcagctgggaaggaggctaatggcgcagactcggacgcctcaagcgaggcctccttctacagtggaactgactctccgacacatgagaacggtgaacacagcatcgcgaagaagaatggttgagctgagttgaactgctttgattgctcaaactgagggagctgactaatgtagttggtcaacataacagttatatctagcttgaacgattgtcaggaccgatggcgatgacagattccaggctggttagatcaccttgtcgggtctaggcggaatgtatatttgctgctcatgatattatagtatgtaagaccataaacggtgagtttgtgatgcgctatatatcttggaataaagttcaacttcttcgttttcttactcgaaaaaaaaaaaaaaaaaaaaaaaaaaaaaaaaaaaaagcggcctggataagaacatcctgcccaaagtaatatcaattg

SEQ ID NO: 313 - DNA, 989 bp, Zea mays
ccacgcgtccgctcgactccgcccagtttttccaccaggcgctgtacctggggggcgtcaccgccgcccccgctcggcccacgctccgcctcatgaagcagaacctcgcgttcctctccagcgtcctcaccgagcaggcccagctgccggccgtgctcgaggtgatgagggcctccgtggaggccttcctgacggtcgtcctcgctggcggcagcgggcgggccttcgcccgcggggaccacgccgccgtggccgcggacttcgcgagcttgaagcgcctgttctgcagtttcggggtcggggaggaggcggtcgagagggagacggtgcgggcggaaggggtgctggcgctcatggccgttccgacggaacagctcatccatgagttgctcggccactatgcttccactccgatgagagcggcgggtgacgagttaccgcagctgccgatgatgccgatgacgcccacggcgagacgctggagccggtccgacgccaacaccgtgctccgcgtgctgtgctaccgagacgatgagcctgccaacagattcttgaagaaaacctttaatctgcccaagaggaggtagccgattacgcagttctatcgccggcccataggatcggattggatctatcattcgcgacccaaagggcctgttcgtttctgttgggtttcacaaaaattatttcggctaatcaaaccttatataaattagacaagcaatctacgtaggaattgttccgagtgttcaattctctggaaccgaacaaggcctaatactttttttgaaagcacgttcttattatacacatgtaacaggaaacaggaaagcacgtagacggtggtgtaggtttggtgaggtgagaaacgggaggtcttgcattcctattgatttttcatcgatctgtgttgtgtttatttacgccattggccgacattatttaatgatgtcatgagccatgtggtatacatgaaaaagctctccccc

SEQ ID NO: 314 - DNA, 385 bp, Zea mays
tgccggacactcaggaatgttctactacatgctcaggggcttatttcatctttgcatctgtatacgctgtcttagttcaagtaacatggcattgcgtggggatatttttggcttcatcatcaactattctctacatcatgattctaatgtcccggaaatgtttaagccatatgccccagtacttgatgctaaataaggttttcagacattcatggaacaacattcatcttcgcagctgtcaaattctctactggccaattgtcttccaagatgcatccttaagctccactgtgaatgttgaatatgcacacaaagctgcaattcggaagcatgctttgtggtcaagtatcattgtggatctcctgatgggttttgtccttggagc

SEQ ID NO: 315 - DNA, 2259 bp, Zea mays
acgaggtgtacgcgcgggtgtggttgctgcccgaggacgaggccgcggagaagcgggcgctcgagaaggtccgggtcgccgaggccgcggagcgccgggaaggcgaggattgcggcgccatgaggccgctcgcacggacgccgcacatgttctgcaagacgctcacggcatccgataccagcacgcacggcggtttctcagtgccgcgccgcgccgccgaggactgcttcccgccgctggactacagccagcagaggccgtctcaggagctcgtggccaaggatctacacggcacggagtggaagttccggcatatctatcgaggtcagccacgaaggcatgtcttaaccactggatggagtgcatttgttaataggaagaagctgatttctggagatgcagttctcttccttcgaggcgaagatggagtgcttcgactgggagtgcgccgagcagcccagctaaaaattgtaactcctctacctgcacctcataacaagtgctcaagtaatagcaatcttggaaacgtttgcacaagctgtgggccacgaagactgtttttccacatctactacaatcccagggtaactcaattctgaattcattgtacccttattggaagttcacaagaagcttcaatcaaccaatttctgttggaatgaggtgcagaatgcgatatgaaagtgacgatgcttctgaaagaaggtgcactggtataataattggaagcagagaagctgatcctatatggtatggttcgaaatggaaatgcttggtggttagatgggatgatggtatagagtgccgttggcccaatagggtatctccttgggagattgagctcacaggatctgtttcaggatctcaaatgtgcgctcccagttcaaaacgtctgaaaccatgcctcccccaagttaatccggagattgtgcttccaaatggaagtgtttcttcagattttgcgggatctgccagattccacaaggtcttgcaaggtcaagaattgttgggtttcaaaacccatgatggtcctgctatttctgcttctcaggcaactgaagcaagaaatttgcagtacagtgatgaacggagtaacaataacttagggatcccaagacttggtgttaggtctccaactggaatccctgggtttccctaccattgctcaggctttggggaatctcaaagattccaaaaggtcttgcaaggtcaagaagtgtttcatcctttccgaggaggatgtttggctgatggccatataagaactgctggcatgtatcaacctgacggtaggcatgtatctggtgcagcttataaatggtctgcaccacaagggtatgatttcccacagccagcaaaaccgttttttctgttgcaagaatcatccccatcatctgtgatgatgtttccacaaactagatctaagataactcacttggaatatgagtactcaagacatgaggatggtagacttgataggactgttcctactcaagacatgggaagaagcaatcaaacattatctctttggcctcatcttgtttcaggcgaagcaatagaagaatgtactggaactgtgaatatgcactcccccgtcagtggtgcagagcatgaatcaaacaatgagagtacagttgaaaatggctgcaaaatctttggtatctcattggctgaaaagatccgatcatgcgatgaagcagactcttgtagtgcaaaatgtaattctcggctccagcctttgaagtcacaaatgccaaaatcgctaggcagctgttgggccactgttcacgagcaaaggcctgttgttggcagggtggttgacgtctcggcgacggatatgatgatctgatccacatggcatatccttgtagaatatgcaggaaggactaccgagtgcaactttcatggcctgaaccacatcctggatgaaagattgctgaaggtgaccttatgattcttgaaacagggatgtttgacaaatttgtaatgtacttttgggctttaagtatcttattatcttaagctacctagtaatcagcacttgtaccttaaggtgtgcgttatggcaagttcttttagagggcttgtttggactagcaccatctcccaagtactcgtcgcattgtttctttgccccgggaaacaagtccgttttggaagtttggctccagtcctgttggtaccatttgttgcatcgtgtgtgcttgtacaattgcacatctcaagcggtaaagcaagaattgaccagctaaaagggga

SEQ ID NO: 316 - DNA, 359 bp, Zea mays
ccaaacttgaaaaatggcacggatcctcttttgatgccatttaattcctacatggcagattggagcagcgataagataacttacaccactctgaacactccaaaaataagcacagaacttccagtcaagttacaccatgacaaaagtagtagctttgaagcaccaaacctgaaggagcatgaatcagtctttgcaacacatgaaatgacggtagaagcaacaagaaaagaagacgaacacacatcaaaatctagttttacttcctacaatggagtaccagatacagctgcacaagcatcaaagccaaagaaaacaagaaccacaactgctaaaaacacagagaaatttgactgggaaaa

SEQ ID NO: 317 - DNA, 1188 bp, Zea mays
taggggccttttttttttttttttttggtcaaagaaagctcaggcttcacttggttagttgtttactccaaatctacagcaaacatgcggttcagcgcctcaagtttcttgaccattggctcaagacaaaaaaagaaaaatgttacacgagtgagttgacaccacactagctgttggtcaaagagacacaattatgctgccgatcttgttttgaggaccctgcacttgagcactctatcttgcacgtaaaaccccggcgtcaccatgatcttcacttgacaaggactctgcaccggctgcctgtcatgcaggatgtcttccatgtacagctcatcaaatgcacggccgtcttggacgcgcaggatcgtcagcggcgggccgaaggagaaggccagcaggtggagcagccagacgcacttggcggcgacgaagaagcactgaagcagctgctcgggccacggccgggaccaggcaagcgtcgccacgacgacgctcatcttccggtcgcagaaacggctgaagtcctcgctgtagtacttggtgcccttccgcagaacctcgttccagctaaggttgcgcagcgccacgaaggctgcgaagctctgccggctgtcttccgccgggtcgaggcacctcggcgagccgttccgctggaacgcggggttctcgaagtcctggaacatgacctggttcatgatcgcctcaagatggtacagcacggccttcgagcagtgtttgctgacgctgccgctgctgagcgcgagctggtacgggcgaaggagcaggttcagcttgtcggacaggccgtcactggactcttcgttcacctgctggatcagcgccttgcagagctgcttcaccgagagccgtgcctccgacgcgatctgcaagaagccttccaccattacctcgtggctcaccggcgtcgggagctctcgtcttgcttcgactgatctcgtcgatctccgcgagacggacggcgagttggtggcctgccgcagtgccttcttgagctccgagcagtacgcttccacgctcaccagcttggtggccagctcccccagcgacgacctcacctcggcagcttcgcgcagagcggcgtcccggtgcgcgttggcctctgcgagctctttcttgagggactcgagagaaagcgccccccactcggtcagcagctgcggcatgttg

SEQ ID NO: 318 - DNA, 819 bp, Zea mays
tgactgccaaaatatgtttgggtcattgctatataccgcacggtcttgaatctctaaattagcaacgtgccaatcaacaagccttgcttgaatgcatttcaacagcatgagtccggttgggaagagccaccaaccgctttcatccgttcccaggttccagggctgcacgctcgggtgtgttttggttgataacttataatgtacaaaaccacatatgaaagccacaacaacattgaccagtgaagttatgttccacaatgcatacacacgagcaaggcctgctgaccgcctcggtccatgactaaatagagcatttataccggcaggaaaaggcgacaaaatcccaagcggtagaataaacaaaaccaagagaacatcgaccatagaatatgaatacagctggagaaaagtaagcaaaactaagctgaaatctgcaagaagcagtattgagattaccaaaccaacaagatcctgatgcccaactggtttcgaattgtgcaagatatgagaaaatgggtaaaacaaatctctcctgtcttttagtgtccttaagctattactattgagaactccaccagtgatcggtgtgtgttgctctatttttactctagggcttccatcaggttcggtaagtgcagcttctccttcaacagcataaacaagaagaccaagttggcagtaccctaatgctgtagcttggaaccaggcaagatcaacacggataccattctcagctaaagagggatttgcatgagattcaagccagttgatgaccggaagaaacgttactttcagatttccaccacggaccaaacgcag

SEQ ID NO: 319 - DNA, 734 bp, Zea mays
tttcatttcatatctcaggtgcatcacgtcatcttagccttggatgtcatagatgattagtgtgaatggttgtccatctgctagtttctgggttccctaagacaacatatgctcaacatctcgcaggaagaaagagagatggcacacctctacgagcgcaggaagttcccgtaccctggcgatgatgaggcggtcgaggagtttgtaaagagcggaggtgctcttggaaccacaattggacccaggggattcgctgacgccaatatggattctgaaaacatgcagaagcagctgcagtctaagaagttcgagcaggaagcacagaaactgtggattcggatgaggaatgaggtcgtacaggagctccaggagaaggggtttgatatcgagtgaatttgaaacctgcagtatggtcggcgctgaggatgttaaaacttaaaaccacttgccatctaaattggagaactgtataacttaggaataaaagagtttgtagctatctttttaactaactatctggtgctgcattcttggtgctgctagattgtaccgaaaataaattttgatgtcttgtggagaaccgaggatctcatttgaatatttgatcctctttttatgtttcttattgcctgatcatcaaattactcatgttttgatgttggtgcatgcaacctatatgtgcagcattgaggatgcgttggtacttggcatatatgctagtccatgattatttc

SEQ ID NO: 320 - DNA, 2347 bp, Zea mays
ccggccgggccgggctcctgacatcattcacttgcttctcctgaccatcattcacttgcttcccttgacaactgatagtagctgcagcatctaataccatgaatgagagctcagcagcggccagtagttatctcctcctcacattgattattcatctgctgccgttcgtctcagcccatgatttcctgtcagccggttcgtctctctccgtagagcacagctctgatgtgctccactcgcaagatggcactttcacctgcggcttctaccgcatctcccccaacgcctccaccttctccatctggttctccggatcatcggaaagaaccgtcgtctggagcgccaaccctccccaccccgtgtacacctggggatccaaagtcgagctagacgccgacgggagcatggttctaaaggactacaatggccagatcgtgtggaccaacaacgcgagcgtttcggacgctgggcatgttcaagctcggctgctgggcaccgggaacctcgctgtggagggaagaggtggcgccatcctgtggcgaagctttgattctcctactgacaccttgttacctactcagagaatcactgcttccacaaagctggtctctactaacaggttacttgttcctggccactacagcttccgtttcgacgaccagtaccttctttctctgtttgatgacgagaaaaacatttctttcatctactggccaaatccgcgtatgactatctgggcgaagggtagagtgcagttcaacagcaccatgttctggggctcttgacaccttgggacatttcccttgcaagtgacaatgcaacctttacagctgctgactggggccctggtatcatgaggcggctaacactggattacgatggcaacctcagattgtacagtcttaatgtggcagacagaacatggtcggtcacatggatggcgtttcctcagctttgcaatgtacacggtctgtgtggcgaaaacggaacttgtgtgtatacgcctgtgcctgcttgtgcgtgtgcccctggttttgaagtcatcgacccaagtgagcggagcaaaggctgcagaccaaagaccaacatcagttgtgatgtggagaaggtggattttgctaagctaccccacactgatttcttggggtatgatatgactgcccatcactccgtttctcttgacttttgcaagaaggagtgcctgcatgattgcaactgcaagggttttgcatactgggaagggattggtgattgctatccgaagtctgttcttgttggcggtgtaaccctgcagaactttgctagtactggtacgatgtacatcaagattcctaatggattacaagtgttggatgcctcaattccgcaatcacaaccttttggtcccaagtatagtcctgactgtggtacaacaaatagatacttcatagcagattttctggataagcttaagagagatcatagtggatcaaagtatctgtacttctatggattcttgtcagcaatatttctggcagaggtagtgtttgttggattaggatggtttattttgaggagggaatacagagaactgagaggagtatggccagctgagcctggatatgaaatgatagccaatcattttcgcaggtatgcctacagagagttggtgacggcgaccagaaagtttaaggacgaacttggaaggggtgcatcaggcattgtatacaaaggcgtcttggaagacaagggggcagtagctgtgaagaaattagcagaaataaaccaaagtgaagaagaattccggcatgaactgagtgtgattagcatgattaaccatatgaatctagtgagagtttggggatactgttctgacggtccacacaggatactggtttctgaatgttttgagaatggttcgttggataaaatcttatttggtagcaagggttcagaaatcttgcttggatggaagcaaaggtttgatattgcgctgggggtggctagaggattggcctatcttcaccacgagtgttcagagtgggtcattcactgcgacgtgaagcctgaaaacatactgctggatgagaacttggtgccaaagattgcagactttggccttgcaaagctcctgaacagaggtcgatcaaacttaaacgtttcaaagatccaaggaactagaggttacttggcgccggaatgggtttctagcctcccgatcacagcaaaggttgatgtctacagctttggagtggtgctactggaactactaataggagcacgtgtctcaaacatgggaaatgatgaggatgtggaagcggagatggtccttggaagggtgtcaaggctggtcaaagaaaagctgcag

SEQ ID NO: 321 - DNA, 3167 bp, Zea mays
gtcattcagggtggaattggccctgccggcttatctgctgggaccttcatgttctggatcttacacaacaacgaccgcgatggcatagagtggtggttcaaggtcctggtcctggtccacggtatggacatgtgatggccttggttgggcagcgattcttattgacaattggtggcaatgatggaaaacggcccctggcagatgtatgggcccttgatactgcggctaagccatatgaatggagaaaacttgagccggaaggtgaaggaccaccaccatgcatgtatgcaactgctagtgcccgttctgatggtctccttttgctttgtggtggaagggatgccaatagtgtgcccctatcgagtgcatatgggcttgctaagcatagagatggtcgctgggagtgggcaatggcccctggtgtgtctccatcacccagatatcaacatgcagctgtttttgtcaatgcacggcttcatgtctcaggaggggctcttgggggtggtcgcatggtagaagattcctcaagcgtcgcagtattggacactgctgctggagtttggtgtgataccaaatctgtagttacaactccaaggacaggaagatatagtgcagatgcagcaggtggtgatgcttctgtagagctcacacggcggtgcaggcatgcagcagccgctgttggtgatttgatatttgtttatggaggtttaaggggaggtgtgctgctagatgacctcctagttgctgaagatcttgctgctgctgaaacaaccagtgcagctaatcatgcagcagcagcagctgcatccacaaatggacaaagagaacctggtagatatgcctacaacgatgaacaatcaggacaaactgttacagtttcaagtcctgatggagctgttgttcttgggactcctgttgctcctccggtcaatggggacatgtatactgatattagtcctgagaatgccattatccagggacagagaaaaatgagcaaaggtgttgattatttggttgaagcatcagctgcagaggctgaggcaatcagtgctactttagctgctgtaaaggctaggcaagttaatggtgagatggagcattcacctgatagggaacagtctccagatgctgcaccaagtaccaagcaaaattcaagcctcataaaaccagatgttgctcttgtcaacaattcaacagcacctcctggtgttcggttgcaccatagagcagttgtggtggctgcagaaactggaggtgccttaggtggcatggttaggcagttgtccattgatcagtttgagaatgaaggtagaagggtcatttatggaacccctgagaatgcaactgcggcaaggaaattattagatcgacaaatgtctattaatagtgtgcccaaaaaggtaattgcttctcttctgaaacctcgtggctggaagccccctgttcgaaggcagttctttcttgactgcaatgagattgcagatctatgtgatagtgctgaaagaatattttcaagtgaacctagtgtcttacagctgaaagctcccattaagatatttggtgatctgcatggtcaatttggtgacctcatgcgcttatttgatgaatatggcgctccttcaacagctggagacattgcttacattgattatcttttcttgggagattatgtcgatcgtggtcagcatagtctggagacaatcagtcttctccttgcactgaaggttgaatatcctcacaatgtacatttaattcgagggaatcatgaagcagcggatatcaatgctctttttgggttccgaatagagtgcatagagagaatgggtgagcgggatggaatctggacctggcaccgtgtgaacaggttatttaattggcttcctttggctgcactaatagaaaagaagataatttgtatgcatggtggtattggtcggtccatcaaccatatagagcaaattgaaaatcttcaaagaccaattaccatggaagcaggctcagttgttctgatggaccttctgtggtctgatccaactgagaatgatagcgtagagggactcaggccgaatgcacggggccctggtcttgttacctttgggcctgatagagttatggagttctgcaacaacaatgacctgcagttgattgtgcgagcacatgagtgtgtgatggatggctttgagcgattcgcccaaggtcacttgatcactcttttctcggcaacgaattactgtggaacggcaaacaacgcaggtgcaattttagttctcggaagggatctggtggttgttccgaaactcatccatcctttgccgcctgctatcacgtcacctgagacctctccggagcatcatattgaggacacatggatgcaggagttgaatgcaaacagaccaccaacaccaaccaggggccgccctcaagcccccaacaatgaccgaggctcccttgcctggatataacaggctggccatattattaaacaattgatttcttgtctcctatcattggcttgaggctaaaattatccatccattctggacacatggaagcactctgctgaaagcacacagctggcccaaaacaatgtcgaaagaaaactgttcagggagcgagactaagcggtgctctgaaggcgaaggccagagaagagtcactgtcgacagcgctccccaaatcctttccacaaacaagtagaagagcagaaccaagtgttggtaaaccacaggatcttgcctgggatcgcgcctgtacatactcagacgccagcagatagaggaggggttgtgtatgtgttctttttgtcttagcgtcgaaagggatagcagcgtccattgtactaggtattcatttgctgtagattttgatttgttgcctcatgttgcaaagtatggagtgggaaagttggtttcctcgtgtgacggacggtggtctgtcaggtcttgtataatagcgttgtcggctgtttatgtttgcagcgcgtcagctgttacttagcacaccttacacctccctcatgttgtaattcccatcaccggtgctgatgaatgtgcacaatatattgttgtctgttgtccaaagttttgggtcctggacgggttaggtgatttgatttggttattggagaagcaatacgttgtttgattttgaaaaaaaaaaaaaaaaag

SEQ ID NO: 322 - DNA, 2783 bp, Zea mays
gtcagtcagtcagcagccgcaacctcgtacaatcacgaaagcagcacacgagtccacaacagcaccccgcctctttttcttcacgtgcgttgcgagcgctgcccccatggagaccctcctggctggcaaccccgccaacggcgtggcgaagccgacgtgcaatggcgtcggcgccctgcccgtggccaactcccacgccatcatcgccacgccgtcggctgcggcgactctggcattgggtacctcgaggccggccgggcaccgaaccaaaccaacacacgtcaaagcagaaaacctcagaaaaccccaataaatcatcctcgtccaccactgcccccgctctgctgcaactccactcggcccggccgccctttccacccaccttgatcctctgatccgttggtgcttgaccgatccatggacacccatatcggatccgtgaacggggcggcgtcgaaccagacggttggctgcccggcgtcggcgccggggtgcccgatggcgtccacgccggcgcagcccgcggcgaccctgtcggcgggggaggcgtcgctggggcgccacctcgcgcgtcgcctcgtgcaggtcggcgtcaacgatgtattcgcggttccgggggacttcaacctcacgctgctcgaccacctgatcgccgagcccggcctgcgcctcgtcggctgctgcaacgagctcaacgccgggtacgccgccgacgggtacgcgcgcgcgcgcggcgtcggggcctgcgccgtcacgttcacagtcggggggctcagcgtgctcaacgccatcgcgggcgcctacagcgagaacctgcccgtcatctgcatcgccggcgggcccaactccaacgactacgggaccaaccgcatcctccaccacaccatcggcctccccgacttctcgcaggagctccgctgcttccagaccgtcacctgccatcaggcggtggtgaacaatctggatgacgcgcacgagcagatcgacacggccattgccacggcactgagggagagcaagcccgtgtacctcagcatcagctgcaacctccctgggctgcctcatcctaccttcagccgcgacccagtgcccttcttcctcacccccaggacgagcaacaagatggggctagaggctgcagtggaggcaactgtcgaattcctgaacaaggcggtgaagccagtccttgtcgccggccccaaactgcgtgtggcaaaggcaggaaaggcatttgtcgatatggtagatgccagtggctatgcctatgccgtgatgccatcggccaagggtcttgtgccagagactcacccccacttcatcggcacctactggggcgccgtcagcaccgccttctgtgcggagattgttgagtccgcagatgcctacctctttgcaggccccattttcaatgactacagctctgttggctactcattcctcctcaagaaggaaaaggccatcatcgtccagcctgagcgtgtgatagtggggaatgggccggcattcggatgtgtgatgatgaaagagttcttgtctgaattggctaagagggttaataagaacaccactgcctatgagaattacaagaggatctttgtacctgagggccagccgctggaaagcgagccaaatgagccactgcgagtgaatgtgctcttcaagcacgtccagaagatgttgactggtgatagcgcggtgattgctgagactggtgactcctggttcaactgccagaagcttaagctgccagaaggctgtgggtatgaattccaaatgcagtatggttcgattggatggtcagtgggtgcattgctcggatatgctcagggtgcgaaccacaagcgtgtgattgccttcattggtgatgggagcttccaggttacagcacaggatgtgtcaactatgctgcgatgtgagcagaacagcataatcttcctgatcaacaacggtgggtacacgattgaggtggaaatccatgacgggccatacaacgtcatcaagaactggaactacactggctttgtggacgccatccacaatggcttgggcaagtgctggacctccaaggtgaagagcgaggaggagctgacggctgccattgagacagcgctaggggagaagaaggactgcctgtgcttcatcgaggtgatcgcgcacaaggacgacaccagcaaagagctgctggaatggggctctagggtttctgccgccaactcccggccaccaaatcctcagtagaagtcccgcaggctccaagcctcggagtgccagtagtgatagtaagctgtagcacggtgggggctcaaccgaataacgtgaacgcattgccctttctgttacgtgttttattttattgtgtttctgtggtcgtatatctgttttgtgacgtgttccctgcttctcccatgtgaattccagaagaactatgagaaaattcaggttggttgtcactaaaaaaaaaaaaaaaaaaaaaaaaaaaatctgcacactgcttctgtgttgtcactatttgtgctgcgttaccggtgtgattttactgatcaggtaaacatcgccggccagggagtgaatcaagcgttttagatgagcccgtcgatcggttttgagggttcctgcaaaggggcctgggtttgggtctgtctcccctgaaattttttcgggtggtttactcgttttcagtcagttactcagtttgtccgtttttgtcgagcaaaactacatccctgctgagggaagctgcccatttttttcctccgatgaaaaagtttgcaatttcccttgct

SEQ ID NO: 323 - DNA, 3080 bp, Zea mays
aattcggcacgaggcccaatgcgtagttgtatctgcatctccaacgccaccagcagaggttccagtttagttttttttttagattagaaaaaatcgagtccaacagactcgccgcactgcgcgggaccgacctcgtctcccgtgtgcgccgccaataatggagacccgggacatggctgcgacgccgctcccctactcgtacacgccgctgccggccgccgacgccgcgtcggccgaggtctccggcaccggcaggacgcggagcaggcggcggcccctctgcgcggcggcgctcgtgctctccggcgcgctgctgctagccgtggccgcgctcgtcggcgtcgggagccggcccggcgcggtggggatgacagagggggggtggctgctggggcgacgccggtgctgggttgggtacctcgaggccggccgggaggtggtatcataccagcactaatgcaccggatcccatcagaactccgcagttaagcgtgcttgggcgagagtagtacatcccacccctcgcccaatgcgtagttgtatctgcatctccaacaccaccagcagaggttccagttagtttttttttagattagaaaaatcgagtccaacagactcgccgcactgcgcgggatcgacctcgtcgcaactcccgtgtgcgccgccaataatggagacccgggacacggatgcgacgccgctcccctactcgtacacgccgctgccggccgccgacgccgcgtcggccgaggtctccggcaccggcaggacgcggagcaggcggcggcccctctgcgcggcggcgctcgtgctctccgccgcgctgctcctagccgtggccgcgctcgtcggcgtcggtagccggcccggcgcggtggggatgacagagtcggcggcctcgtcgccgacgccgagcaggagcaggggccccgaggccggcgtgtccgagaagacgtccggcgcgtctgacgacggcggcaggctccgtggagccggcgggaacgccttcccgtggagcaatgcgatgctgcagtggcagcgcacgggattccacttccagccgcagaagaactggatgaacgaccccaatggccccgtgtactacaagggctggtaccacctcttctaccagtacaaccctgacggcgccatctggggcaacaagatcgcgtggggccacgccgtgtcccgcgacctgatccactggcgccacctcccgctggccatggtgcccgaccagtggtacgacaccaacggcgtgtggacggggtccgccaccacgctccccgacggccgcctcgccatgctctacacgggctccaccaacgcctccgtccaggtgcagtgcctggccgtgcccgccgacgacgccgacccgctgctcaccaactggaccaagtacgagggcaacccggtgctgtacccgcccccgggcatcgggcccaaggacttccgcgaccccaccacggcctggatcgacccctcggacggcgcatggcgcgtcgtcatcggctccaaggacgacgacggccacgcgggcatcgccgtcgtctaccgcaccacggacctggtgcacttcgagctcctcccgggcctgctccaccgcgtcgacggcaccggcatgtgggagtgcatcgacttctaccccgtcgccacacgaggcagggcgtcggccaacggcgtcgacatgtccgacgccatcgccagcaacggcgccgtcgccggggacgtcctgcacgtcatgaaggccagcatggacgacgaccgccacgactactacgcgctggggaggtacgacgcggccgccaacgcctggacgccgatcgacgccggcagggacgtcggcatcggcctgcgctacgactggggcaagttctacgcgtccaagacgttctacgacccggccaagcgccgccgcgtgctgtggggatgggtcggcgagacagactcggagcgcgcggacgtgtccaagggatgggcgtcgctgcagggtatcccccggacggtgctcctggacaccaagacgggcagcaacctgcttcagtggcccgtggaggaggtggagacgctgcgcaccaactccaccgacctcagcggcatcaccatcgactacggctccgtgttcccgctcaacctccgccgcgccacccagctggacatcgaggcggagttccagctggaccgccgcgccgtcatgtcgctcaacgaggcggacgtgggctacaactgcagcaccagcgggggcgccgccggccgcggcgcgctggggcccttcggcctgttcgtcctcgccgaccgccgcctccgccgcgagcagacggccgtctacttctacgtggccaagggcctggacggctccctcgccacgcacttctgccaggacgagtcccgctcctccagcgccaccgacatcgtcaagcgcgtcgtcggcagcgccgtccccgtgctggaggacgaggccacgctctcgctccgggtgctcgtcgaccactccatcgtcgagagcttcgcgcagggcgggaggtccaccgccacatcgcgcgtctaccccaccgaggccatctacgccaacgccggcgtcttcctcttcaacaacgccaccgccgcgcgggtcacggccacgaagctcgtcgtccacgagatggactcgtcatacaaccacgactacatggcgccggtggcagacatctgatcgatgcaatgcaaccacgccactctgcaccgcaacaaattttccaacacacataaatataccaagcaattcccatctgtcaaattttcttatttccctgccatgattttggtctctatttttcctgctggctactacttatcttccagcactagtaatgtacgtactggctagtaactagggtatccagtgggaagacgtgtagcctctagttgtacatgcatgtatgatgctgtgtagcaccgcatcatgcacaccacaccaatgcaaatgagttataaatgtttttaagctccaaattaaaaaaaaagaaaccggagcagtcaaacgaggccagaaaaaaaaaaaaaaaaaaaaaaaaaaaaaaaaactcgagagggggccggta

SEQ ID NO: 324 - DNA, 447 bp, Zea mays
  misc_feature (432)..(432): n is a, c, g, or t
tgcatgcctgcagaaatattttgcatgtcatcaacagcagcaataacagctcggacgatgtgcttaaaggatctaataaccatttcatgaatgcatatagactggatgtgtgggagcttctctgctagctccaccacacgacctaaagaggacatattaagtccccttgtatgcatgaaatcggtcatggttcttccatccacaggagaaagctcaagggacgcgaaatcagccacctgtacgaaatgtattctaacaaaatagctaaaacaaggcttaccagctttgggagtgcagtctcatcatagaaattatgggccatctttgtgagctcttcgagggactgggatcaagaaataataaactgaggaaactacataataaaggttaaccaacatgttcttggtgagctcttctattcccacatcacangctacttcagagttc

SEQ ID NO: 325 - DNA, 1688 bp, Zea mays
cctgccctcgacaccggccggccgtcatctcattttccttttcacgcccactcactcaccgccgcccccgccgccgccatcccctccttgccgtctccgggcacggcctcgtcgaatcctttgctcctcctccgccgcagccgctgccatggactccacgccggcgcacgaggcggctcccggagcctcctcttccgccaccgccgccgccgaggatctggcgggtggcgtggcggcgatgaccctggatgagcggttcgctctgctgcgggggatcggggaggagtgcatccaggaggacgagctcaggcgcctgctcgagaacaagcccgtccccatctgctacgacggcttcgagccctccggacgcatgcacatcgcccagggcattgtgaagaccatcaacgtcaacaagatggtcagagccgggtgcaaggtgaaaatctggattgccgactggttcgcgcagctcaacaacaagatgggaggcgacctcaagaaaatccagacagtcgggcgctacatgatcgagatttggaaggcggccgggatgaacctcgacggggtggagttcctgtggtcctccgaggagatcaaccggcgcgcccacgagtactggccaatcgtgatggacattgcccggaaaaacaacgtcaaacggataatgagatgctgccaaattatgggcagaagtgaccaggacgacttgactgctgctcagattttctacccttgcatgcaatgtgctgatatattttttcttgaaggctgacatatgccagttggggatggaccaaaggaaggtcaatgtgctagctagggagtactgtgatgacatcaaaagaaagaacaaaccaattattctttcacatcatatgctccctggttttaaagaaggccaggagaaaatgtcaaagagtgacccatcctcggctatctttatggaagatgacgaagcccaagttaacgtgaagataaagcaagcattttgccctcccaaaattgttgaggggaatccttgtttggagtacattaaatacatcgttttcccttggtttggaaggtttgaggtggcccggaaggaaagcaatggcggtaacaagacatttacaagcatggatgaactaatttctgattatgagactggtgctttgcatcctgctgatgtcaaacctgcactggcaaaagcaataaatgaaattttgcagcctgttcgtgatcacttcaacaacaacaacgaagccaaagttctactaaacactgtcaagaagtacagagtaaccagttgaggagcggaaggtgttcatctttagggtgaatgtcgctgattgaaattcttatatgcttattctgttactaatgccaccactcattttagatcaagcattgagccattggttatcagtgtataatctctatgaaggcattttggtggcagtggccttgtctgtcattggctacaacgttctagataaaaaaacatttaaattttgtggaagttgaattatcttctcatgtgtgtatgactgtatgtgagactggttgaaagtgcaagcgacaaggcatatatggccgagaagtttaaaagaaaaaatacaaaaaaaaaaaaaaacaaagcccatctcccggagaaaaaaaaaaaaaaaaaaaaaaaaaaaaaaaaaaaaaaaaaaagggggcccggtacc

SEQ ID NO: 326 - DNA, 2144 bp, Zea mays
gcgttcgccccgcgtccgccccgcgtccgccgagcgtccgcccgggcagcgtcccctcgaggccggccgggacaagatcacttcgggaggcaagtgcgatttcgatctcgcagccacctttttttttgttctgttgtgtatctagtagttggaggagatatgcagtttgcacttgcattggacacgaactcaggtcctcaccagataagatcttgtgagggtgatgggattgacaggttggaaaaattaagtattgggggcagaaagcaggagaaagctttgagaaataggtgctttggtggtagagttgctgcaactacacaatgtattcttacctcagatgcttgtcctgaaactcttcattctcaaacacagtcctctaggaaaaattatgctgatgcaaaccgtgtatctgctatcattttgggcggaggcactggatctcagctctttcctctgacaagcacaagagctacgcctgctgtacctgttggaggatgttacaggcttattgatatccctatgagtaactgcttcaacagtggtataaataagatatttgtgatgagtcagttcaattctacttcgcttaaccgccatattcatcgtacataccttgaaggcgggatcaactttgctgatggatctgtacaggtattagcggctacacaaatgcctgaagagccagctggatggttccagggtacagcagactctatcagaaaatttatctgggtactcgaggattattacagtcacaaatccattgacaacattgtaatcttgagtggcgatcagctttatcggatgaattacatggaacttgtgcagaaacatgtcgaggacgatgctgatatcactatatcatgtgctcctgttgatgagagccgagcttctaaaaatgggctagtgaagattgatcatactggacgtgtacttcaattctttgaaaaaccaaagggtgctgatttgaattctatgagagttgagaccaacttcctgagctatgctatagatgatgcacagaaatatccataccttgcatcaatgggcatttatgtcttcaagaaagatgcacttttagaccttctcaagtcaaaatatattcaattacatgactttggatctgaaatcctcccaagagctgtactagatcatagtgtgcaggcatgcatttttacgggctattgggaggatgttggaacaatcaaatcattctttgatgcaaacttggccctcactgagcagccttccaagtttgatttttatgatccaaaaacacctttcttcactgcaccccgatgcttgcctccgacgcaattggacaagtgcaagatgaaagatgcatttatctcagatggttgcttactgagagaatgcaacatcgagcattctgtgattggagtctgctcacgtgtcagctctggatgtgaactcaaggactccgtgatgatgggagcggacacctatgaaactgaagaagaagcttcaaagctactgttagctgggaaggtcccagttggaataggaaggaacacaaagataaggaactgtatcattgacatgaatgctaggattgggaagaacgtggtgatcacaaacagtaagggcatccaagaggctgatcacccggaagaagggtactacataaggtctggaatcgtggtgatcttgaagaatgcaaccatcaacgatgggtctgtcatatagatcggctgcgtttgcgtctacaaaacaagaacctacaatggtattgcatcgatggatcgtgtaaccttggtatggtaagagccgcttgacaggaagtcgagcgttcgggcgcaagatgcgttgtctggcatgctgttccttgaccatttgtgctgctagtatgtactgttataagctgccctagaagttgcagcaaacctttttatgaacctttgtatttccattacctgctttggatcaactatatctgtcatcctatatattactaaatttttacgtgtttttctaaaaaaaaaaaaaaaaaaaaaaaaaaaaggaaaaaaaaaaaaaaaaaaaaagaaaaaaaaaaaaaaaaaaaaaagaaaaaagaaaagtatagggtgaaaagaacaaagtgtcagaacaaggttaagtaagtaaagggggggccccat

SEQ ID NO: 327 - DNA, 2024 bp, Zea mays
tttaactcaaaaagagagagatcggattagtttttttttccctaaaatcatgctctacactacatcatacaagactggctactaatattgaacaagctaaataaatatgttctcagattccactaatgttacaagttacaacaacaagcacaccgtgcataaacatacagcaacttagaagatgctccaagtcctagccaacaaaggaaagggaaagaaaatgacttctaggttttcacgtctccttttggttgaccaagaagagatggtcggtagagtgaatggccttgtgccatctcaattctttcgcgtggatcatacattgtctcatctcttatagcctgaagaatcgaatcagcaggacggtccctcgtgatcagaatcctatgtagtgcttttaggatcgggcacatctcaaccggcgcaacagatctgttggcttctggatgcatgacacttaagctatcctgactaagaagctcataaaacgcatcaactgcagagacaccctgaatggtcccttttcctttaatactgtcacccatttctaatgtcaattcacctttagctaacttctgcccataccatgcattacgacctttcaacaatgtgacataagtgtcagctaataagggtccagcaagtttttcaggttcttcttccagaaggtgtgtgatgtagatcatctcagatgtgcaaagtgcaaagtaaacagatttgctggttgcactctcgttggttagtgcagctaccataccagcaccaatagcatagacattttttaagccacccatgacttcatgagtgatgagatcactgttatcccacacaataaaatgaggctgcctcaaaaactttgcaaggggctttctccatttgtcagctccacaaatacgtgcatttgcatattctttgttgtaaatttcagaagcaatattaggtccgccaagataaagaatattctctgatggaactccagttgcattgctaatcatctgcgtgggagttatgatccgtgggagtggatccagcgaggcctcaattcctttggcgagggagatgatgatgggggcagtaatcctctccttccagtacctcctgatctccccgaacacctccctggtgtcggtggaaggcaggccgttgacgacaatgtcagcgtcccagacggcctcctgcaggttggtgacgaccttgagcgggcagagcggcgtgtcgatcatgttgaggcagaagccgtccctgagtatctcgtcggcgtagagcgtgcggtcgccgaggcgcgcctcgacgtacttgaggtaggcgcagcggcggatcaggcggcgcaggacgtcctcgcgcgcgttgatgacgtcgaagaggtgctcggcggtggcgcggtcgacggcgcggcccgggcggcgccagatgcggacctgcgccttgtcgcggaggtggccgtacgcgtcctgcagcagcgcgcagaagacgctgccccaggcgcccgccccgacgccgacgatccggagcgggtcgccgtccgccttccccagctgccgccgcagcaagtccagcttctcctccaccacggccccgttcgcatggccgtccggctggcccagcgcctccgccccgcccattgccctgatctcctccgcctcttcctctctcgccgaaagcaaggcaggctacataacccggtctgtctcgttcggcagaagaggagagacggggaaggctggattaagcgacggcagcaaagctataataactaactcggggagagagaaaggagcggacggcttttcttttggccgaaacgagctcggatcgacgcgaattcgggtgggtttggccgccgaatcgcagcgaggcgaagcgtcggccgcgacggccggagagcccgagggagtcggggcttgctgccggcccgccggccctgtcgcggttgccggttgggttggtgcgccagtacacgtcgcctcgggctctcgatcagctcggccagattggcgcctgctgcccagtgcccactaaaaaga

SEQ ID NO: 328 - DNA, 1687 bp, Zea mays
ctggccgggctccggcgacgcctgcaccggcaagcgcaactacacgtacatggacgcggttaacgccaatctcagtacgtgcggaagcttgacgaatcccctccccccctttggccgcccggccgttgcagagcaaagagctgactctctcgtttcgatctccttccctggtgtgggtcgtttcgccgagcaggtggcgtcaaggtctggttctgcggcttcctgcagtacgccaacatcgtcggagtcgccataggctacaccattgccgcctctattagcatgctggcgatccagagggcgaactgcttccacgtggaggggcacggggacccctgcaacatctccagcacgccctacatgatcatcttcggcgtcgtgcagattttcttctcgcagatcccggacttcgaccagatatcgtggctctccatcctcgccgccgtcatgtccttcacctactccaccatcggcctgggcctgggcatcgcgcaggtggtgtccaacaagggcgtgcagggcagcctgacggggatcagcgtcggcgcggtcaccccggtcgacaagatgtggcgcatgcctgcaggcgttcggcgacatcgccttcgcctactcctactccctcatcctcatcgagatccaggacaccatccgcgcgccgccgccgtccgagtccaaggtcatgcggcgcgccaccgtcgtcagcgtggccgtcaccacgttcttctacatgctgtgcgggtgcatggggtacgccgcgttcggggacaacgcccccgggaacctcctcacgggcttcggcttctacgagcccttctggctcctcgacgtcgccaacgccgccatcgccgtgcacctcgtcggcgcctaccaggtctactgccagcccctgttcgccttcgtcgagaagtgggcgcgccagaggtggcccaagtcccgctacatcacgggcgaggtcgacgtcccgctcccgctcgggaccgccggcggccggtgctacaagctcagcctgttccggctgacgtggcggacggcgttcgtggtggccacgacggtggtgtccatgctgctgcccttcttcaacgacgtggtcgggctcctgggcgcgctggggttctggccgctcaccgtctacttccccgtggagatgtacatcgtgcagaagaaggtgcccaggtggagcacgcggtgggtgtgcctgcagctgctcagcgtcgcctgcctcgtcatcaccgtcgcctccgccgcaggctccgttgccgggatcgtctctgacctcaaagtgtacaaaccgttcgtcaccacctcctgatcgaccgtacgtcctagcttccgtgcagttcaaaacacatacgcacgaacagatcattaattggcgcctagtatatatgtgcagtctttaattaaattaactaggcattaatcgatcgattaccactacgtcgttctagtgatgcgcgtagcttgcatcatcgctcgctgatttaatttccattgtttttctttgatgatctggttagccgaaatggctagtgaattaagagaaaacaaatagtagcagtactgtgtgagtaatcccaagtcaaatacgttattgaagttgtcggcggtacaaaacgcttgtaaaatgtttgtgtttcaattaatcaagaagaattgtacgtgtttcataaaaaaaaaaaaaaag

SEQ ID NO: 329 - DNA, 1964 bp, Zea mays
aagtcgcattccagatctcccctgcctccgctgtataaatagaccctcaagctccctgcaacatccaccggccgggatcaaggcccaagctcagcgaccaccaagcagagcaagccagtgaggtctctcagagcgtagccagccagctacaatggcggggaacgcgctagccaactatgtccaggtctacgtcatgctcccgctggatgtcatcactgtcgacaacacgttcgagaaggaggacgagacgagggcgcagctgaagaagctgacggaggcgggcgccgacggggtcatgatcgacgtctggtgggggctggtggaagggaaggagccgggagtctacgactggagcgcctacaggcaggtgttcaagctggtgcaggaggccgggctgaagctgcaggccatcatgtcgtgccaccagtgcggcggcaacgtcggcgacgtcgtcaacatcccgatcccgcagtgggtgcgggacgtcggcaaaagcaaccccgacatcttctacaccaaccggagtgggctgacgaacatcgagtatctcacgcttggagtggacgaccagcctctcttccatgggagaactgccattcagctgtatgctgattacatgaagagcttcagggagaacatggcagacttcttggatgctggtgtcgttgtggacattgaggtgggacttggccctgctggcgagatgaggtacccatcgtatccccagagtcagggatgggtgttcccaggcgttggagaattcatatgctatgataagtacctgcaagcagacttcaaagcagcagcagaagaggctgggcatcctgagtgggatttgcctgatgatgctgggacgtacaatgacactcctgagaagacccagttctttgcggataacggaacataccagaccgacaaggggaagttcttcctcacatggtactcaaacaaactgatcaagcacggtgataagatcttggacgaagcaaacaaggtcttcctgggatgcaaggtgcagctggcaatcaaagtctctggcatacactggtggtacaacgttccaaaccatgcagctgagctcactgccggatactacaacttagatgacagagatggctacagaaccatagcacacatgctcacaaggcatcgtgctagcatgaacttcacttgtgctgagatgagggacagtgaacagagttcagaggcgaaaagtgcacctgaggaactggttcaacaggtgctgagtgctggatggagagagggcctaaatttggcatgtgaaaatgcactcaaccgatatgatgcaacagcttacaacaccatcctcaggaatgcaagacctcaaggcatcaacaagaatggccctccagaacacaagttgcacggattcacctacctccgagtatctgatgaactgttccaggaacagaactacaccactttcaaaacttttgtcaggagaatgcatgctaacctggattataatccaaatgtcgatccagttgcaccattggaaagatcaaaggcagagataccaattgaagaaatcctagaagtagcacagccaaaattggagccatttcccttcgacaaggacaccgacctaccagtttaaacactccaatgatgcaatctacaggaagaatcacgagacacttaaaaaatcaagacaaatagtaagcctattgtcgagcagtagtctattaactaaataaaatgctgtgtggagcatattataatcgcatattgccccaataatattgtgttgttaaacctgaggcttgatggttatctgatgagttgtaataatagccttggtcttcctgttgtatgtatgtatgtatgtatttgagctaaggaataaaaattgtggctttgtgggttaaaaaaaaaaaaaaaaaaaaaaaaaaaaaaaaaaaaaaaaaaaaaaaaaaaaaaaaaaaaaaaaaaaaaaaaaaaaa

SEQ ID NO: 330 - DNA, 5051 bp, Zea mays
  misc_feature (4184)..(4184): n is a, c, g, or t
gggtacctcgaggccggccgggtctcaagtcccatcgatctgcaagtctcgctacgtatcagtgcaataaaaaaagcagccgcaatggcgagcagcaccatggccctctcctccacggccttcgccggcaaggccgtgaacgtgccgtcgtcgtccgccttcggcgaggcccgcgtgacgatgcgcaagacggcggcgaaggccaagccagcggcggcgtccgggagcccgtggtacggccccgaccgcgtgctgtacctgggcccactgtccggcgagccgccgagctacctgacgggcgagttcccgggcgactacggctgggacaccgcggggctgtcggcggacccggagacgttcgccaagaaccggtagctggaggtgatccactcccgctgggccatgctgggcgcgctcggctgcgtcttcccggagcttctcgcccgctacggcgtcgagttctgcgaggacgtgtgtgtcaaggacgattcccgtatgttcagcgtggcctcgattgactacttctgcataccgacttttttctgcgcggatatatctttggcatatgttactgacacgtcatcttggaattttgaacaattaaaaacaacattgacggttccagttctgagaaggaagaatgtaacagtaactgctcgtcaatgaatggtatgcaagtatcagataagatatctgttgatgaaacgaataagggagctgatgtaagcaagttaatgccagaggatgctttctttcgcttgaagagtttgggagctggccttcatgaaaagtccctcgaagagctcacaaagatggcccataatttctatgatgagactgcactcccaaagctggtggctgatttcgcgtcccttgagctttctcccgtggatggaagaaccatgaccgatttcatgcatacaaggggacttaatatgtcctctttaggcagtgtggtagagctagcacggaagctcccacacatccagtctatatgcattcatgaaatggttattagatcctttaagcacatcgtccgagctgttattgctgctgttggtgacatgcaaaatatttctgcagctatagctgaaactctaaacatattacttggatctcccagacttgaaaatggtgctgacacagatgcccatattgacaataatttgcgtttgaaatgggtagagagcttcctttcaaaaagattctgctggaaactgaaagatgaatttgcacacttacggaaatttatcattctgagaggtctctgcagtaaggttggactggagctagttgcaagagattatgatatgaatagccctaacccatttgacaaatctgacattgtcagcattgttcctgtatgcaagcatgtggtctactcatctattgatggtcgaaacttactggaatcatcgaagatggcattggataaaggaaaattagatgatgctgtgagctatggaacaaaggcattgtccaaaattatagctgtttgtggtccataccatcgactgacggctaatgcatacagccttcttgctgtggtgctttatcatactggagattttaatcaggcaactgtatatcaacagaaggcacttgatatcaatgaaagggagctgggtcttgatcatccggaaactatgaagagttatggggatttatctgtcttctactaccgccttcaacacattgaaatggctctaaagtatgtcaaccgtgcgctatatctgcttcagttttcatgtgggctttcacacccaaattcagctgccacctacataaacgtagctatgatggaagaaggcatgggaaatgttcatgttgctcttcgatacttgcatgaagccctgaagtgcaataagaggttgctaggagctgatcacatccagactgctgcaagctaccatgctatagccatagccctttcaatgatggatgcgtactccctaagtgtgcaacatgaacaaacaaccatgcagatacttcaggagaaactaggggaagatgacctccgaactcaggatgctgctgcatggctagaatattttgagtcaaaagcattagaacaacaagaggctgcccgaagaggcatgccaaaacctgattcatctattgcaagtaaaggacatcttagtgtatcagatcttcttgacttcataagcccagaccaggaaagaaaagaaagggatatgcaaaggaaatgcaggcgtgcaaagaataatatcagagctcatcatggtgaatcagttgaagagaaggagaattttcagcttgtttcaggatctcctcttgaagcaagcaaagacagttttcaagaagaaaaactggatgtgcatcctcctgctgtattagaagaaaattatgctgcccatgatgagcagaagcaatgtgatgttttatcaccagaagaatattctgatgaagggtggcaagcagctagtatgagaggaagatctgcaaatgtaaggaagaaaagcagtcgcaggaaaccggctcttatgaaattaatggttgatcattttgaagatggtcatacaggttctgtgtataggactggtttacaacctcaaacaaaaggagagaaagaagattctgtaagtgctcccagccagctttcatttggaagttttttgaaaaccgacaagttgaatggggattctagcattgctgaagataagacgtgccatggtagcgctaaccaagaacaacggacaaagccaacagtaattaataggccaaccagtatcgcttccaaatttatatcatacaaagatgtggctgtttcgccccctggcacagtattgaaacccattttggagaagaaggaagcaaaggagaaagatagtggacgtgatattgacctagcactgtcatccgaggaagaagataaaaaatttacagaaaaagagaaagaaaagccaagtgaggacagtagcaaagagattctttcaagtcagcgagacttagagagtcatgtagaaatacctcctgacagcaacagtgatgaaggcccatctgcagctagtaaagcgtcgaagcaaactgtcagcttcagctcctccattcaatccaggatcagtgttatcaatgtcccagccatacagcacggtggcagtatatgatgccagtgctattcttcaggcaataccaagtcaagcaatggagattctcccttctgccattgacactagagtgcctcgtggtcctcggtccaccttgtactatcgtactgggcattccttccaaaggaaacaaggttacacgcacagccagagcactattgtaaggggtagctactcccccacaaccatgaatccacatgctgctgaatttgtgcctggaaaaacttcacaacaatctgatgtggctgacagagaacccagtcctgctaatcctgtggccaattctgatctggatgttgtatcgcagaccacagatgaaatgaaggcagaaacgcctgccgcagaaaaggcaggtcaggttgagaaagtcgtttcaggtaaaggaaaggaaaacagggggaaagacatcgtgagaaactcatacaaaacagaacttgcaagggcaaattttactcagtttcattgtgaagtcggtgcacgacagtttaggtccctcccgggctgaaccagagaggaagccaagtggatcagatgaagctagtaatgaacagaccagcgtcttaggcaagaacgcttctggttctggtcgcaaagatccagataaacaagagaaagcgacggaggttactaagggcctgaaggatacagagggattcactgtcgtttcaaaacgccgaaggcgtccccagccgttcatgaaccccataaatggcctatattctcagccgtctatttgcacctctgtcagttaaggtcattgcgttttcgaagacctgcaatattttgagagatggacctttgccttcgcctttgcctttgcttagaggattggtagcagagattttccctatccaagtgagctgtgagcagcgagcatttagtcaaactgtacaaaaggtttccgggataccctttttgtaataaaagaaactgatgtattccgcagtagctgtagcgctggatataatgttcctttgtatgttatatatgacagaatcataggaaatagcagatgttaagttaatccgaatatcccagtagtgcttttcttatgcnctagtgtttctgcagtttctcaagatgtcgtggggatttatcgttgcaatctgcaaatgctgtcagagcagaagaaactgaatctgctaggcgccaagagtttgttcatgaaggcatgtcttttattgcttctttcccctgtgcccagactgctcagtgtggtcattggatgccttgtcagaggacggagcagcgtttcaccgtgaagcaattgcagctgcagaccagatcaccagaccactgaggccaggcgtgaactgggccggcagttttaaagctgttggcagctacgtatactgtacgagtctaaggagtagcctgcagctaagcgtagctgcagagaccacacaaatgtgaatcaaatcagttcagttccaaacgatcattgctgggagccaagatccggataaacaagagaaagcggcggaggctactaagggcctgaaggatacagagggattcactgtcgtttcaaaacgccgaaggcgtccccagccgttcatgaaccccataaatggcctatattctcagccgtctatttgcacctctgtcagttaaggtcattgcgttttcgaagacctgcaatattttgcgagatggacctttgcctttgcctttgcttagaggattggtagcagagattttccctatccaagtgagctgtgagcagcgagcatttagtcaaactgtacaaaaggtttccgggataccctttttgtaataaaagaaactgatgtattccgcagtagctgtagcgctggatataatgttcctttgtatgttatatatgacagaatcataggaaatagcagatgttaagctaatccaatattcagtggagcgcccttgtgctttatgatgttcctc

SEQ ID NO: 331 - DNA, 2474 bp, Zea mays
  misc_feature (2295)..(2296): n is a, c, g, or t
cgggccgcccgcacgccggtgcctgccaccgacgcccactgcgcccgggccccgccacgaggtacacctaatctgtcaccgcccccaccgcacctccgtagcctcttcaatctcgccggccacctcacgtcctcacctcgcgtggcctcccgttctgacttcggagtccctcggtctcaacgactagttgagagctcgcggctccgttcgggcgaggggaggaggttcatgaggctgctgtaggctccgttgcagccgccgcgggcgggagtccgtgattttggacgccccaccgcggcaagatccggaagcgcgttggctgttgtgccgtgagtttcagtttcggtggtcgattgcttcagcctgctgagaagtaggaggggcggccatggcggggtcgaggttcgggtcgttcaagtcggagaagggcgactccgcctccgcagcggcggcagcgggtggagcggcgcagaggagggacccgtacgaggtgctcggggtgggccgcaccgccaccgaccaggagatcaagagtgcgttccgacgcatggcgctcaagtaccatccggacaagaatggcgatgaccctgttgcatcagacaggttccaggaagtcacattctcctataacatcctgtcagatcccgataagaggcggcagtacgatacatcaggatttgatgcaatcgaatctgatagtcaggaactggagctggacttgtcgagtctcaacactgtaaacacggtgtttgcagctctttttagtaagcttggtgtgccaattaaaacaactgtttcagctacagttttagaggaggcattgaatggttcggttatggtttctcaactccagctaggaaactcagtgcagagaaaggtggaaaagcaatcggcccatttctattctgtggatataactgaaaaacaagctaaaatggggctagtttgtcgtgttcactcaaacgataaaagcaaattcaagttgctatattttgagcttgaagaaaatggcgggcttagtcttgcactacaggaagacagtgtgaaggttgggaaagttactgctgcagggatgtatttccttggttttcctgtgtaccgttttgaacaaaataacctggcagctgctgcaaaagattctgatggtgcattctttaaaagattggatagctttcagccatgtgacatacatgaactgaaacctggaacacacttctttgctgtctacggtgacaacttcttcaagagcgctagttatactatagaggttgtatgtggtgaatcttttcctgccgaaaaggagatgctacgaaatgtggaggccaagatactcacaaaacgagctgaactttccaaatttgagtcagagtatagggaggttttggcgaagttcactgaaatgaccagcaaatacacacaagaaatgcaagcgattgatggccttctgaaggaaaggaatgagatccatgcttcctataccaacaatccacctctaaaacggagttccagcaggaataaagccaagtcgccttcgaaagtggccaaaactggtacagaaaaacatcatcagaaggaaaagaaggtgaaggatcactgcatggagggatgtggaagtgacagcgataactcaagtgaaaagaaatcaaaagagcggttcccaaggaagaaatggctgaaccttccattcaaacttgacaggagaaagacgtgctgagcaatgtattatatgttccgttgctattctatcctgttatgcataatcctgagctgaactcacatttcttctctttctcatgcttttataggaagtccctctcggcccaacactagattgatatacagagaatttccactgtggcctcccgaaccaagccctctcccactgctaccaccttccttcgttgtacccggattatttcgtgtaaagatcacatgtgatcctaagaattaaaacgtgagtcgttttagcatatattgtgaagcacgtgctggcaagtttccgttcttggcattgggtcaaattggggtgccctgcttccgattccctgctgcaccgtgcctatgtagcatgtaaagttgtatatgctgcgaatcgtagtacagctatatatttgtgtgtcctaaatcttgagtgtctttttactgccttctgtaaatgctccccaactgatgtaaatacaaaattccatgttcctcgccctaggatccgtgtgccaaattaaaaaaatttaaaaaaaaaaaaaaaaaataaaaaaaaaaaaaaaaaaaaaaaaaaaaaaaaaaaaaaaaaaaaanngggccgtgtggaaaaaatgggaaaagtttttcctgaaaaaaaaaaaaaaaaaagggccccttggtccgcaccttttttctctttttagtagggttaaatgccccctttgggcccccgtgggaaaaatttgggcatggttttcccccaaaaaaaaaaaaaaaacggcccccccgacccc

SEQ ID NO: 332 - DNA, 1546 bp, Zea mays
gtcttcctcggtcgcacccctcaggtccgacgcgctccgttcccctttccctttccgaagcttctcgaccccccatcccctccctgacatggccgacaacgcgaaggccgcggcggcgcatgcgaggccggagtcgtcgcaggaggaggaggaggactggaaggaggccgagggggacgtcgccgaagtcgaccgcgccgccaccaatggcgccggcgaggggggcgtgcccacagacaggccgatccgggtctacgccgacggcatctacgacctcttccacttcggccacgccaagtcgctggagcaggccaagaagtcgtttccaaacacatatcttcttgttggatgctgcaatgatgagttgacacataaattcaaaggaagaactgttatgactgaggatgagcgatatgagtcacttcgtcattgcaagtgggttgatgaagtcattccagatgctccatgggtggtgacagaagagttcttggataagcataacattgattttgttgctcatgattctctgccgtatgctgatgctagtggagctggtaacgatgtttatgaacatgtaaaaaagcttggtaagtttaaggagactcagcgcactgatgggatatcaacatcggacattataatgcggattgttaaagattataatgagtatgttatgcggaatctggccaggggctacactagaaaggatcttggtgttagttatgtcaaggaaaaacgactgcgagtgaacatgggacttaaaaacctgcgtgacagagtgaaacagcaccaagaaaaagtaggggagaagtggagcacggttgcaaaactccaggaagagtgggtggaaaatgcagaccgctgggtggctggtttcttagagaagtttgaggaagggtgccactcaatggggacagccatcaaggagaggatccaggagaggctcatcaaggcacaatccagcgactttggcagcctcctacagtacgacagctacgattctgatgaagccaaagaaaacgacgaggacgaagacgaagatgaactctttgaagacgtcaaggaatagcacctccgtacatatacaatggttttgtagctgcaaattgtgttgtgagtcagttgcctctctctggttggtgatctttatatatggtctcaaaggtaggtcaggttgcaatgtttgtagctgctcttggtgtttgttcaggcaacgcatggttgtaaaagctgtggaaagactcttgtgcagtcaaggatacagattccgatggttacctttgggttagaacatatacggctgtaaaattggaagtcgaggtggttaaaactctgaaatcttgtctgttttccttcccctgacgtgcgtgttgcattcagcatctcagcggagctcctggtgtgtagtctgtggaggtcaccgcttctgccatcgaggttgccgagagcaggattctcagccgtttccagcacgaggaatgttttggaattattcttgtgttgatcgttgaatgaagtaatgacccaataaaagcgtcttggattc

SEQ ID NO: 333 - DNA, 1689 bp, Zea mays
atggcggcacggctcttgcgttacgcgcgcccgcccgcccgcccgcgggagccacgtgacatgattgatttcaatggaaatcttatttattttgacatcgacgacacccgcgacccgccgcggccacccagttgctcaagtgattccaggcccacgccacgccaaccccgggctcaactcgagtccacacgccccagcaccacccctgcctctcagtccagtcccccacccaccaccaccactcctcccctcgccgccgcccgttcccgaccgatccggccggatcgccccgccatggaccagtacgagaaggtggagaagatcggggagggcacgtacggggtggtgtacaagggcaaggaccgccacaccaacgagacgatcgcgctcaagaagatccgcctcgagcaggaggacgagggcgtcccctccaccgccatccgcgagatctccctcctcaaggagatgcagcaccgcaacatcgtcaggctgcaggacgtcgtgcacaacgacaagtgcatctacctcgtcttcgagtacctcgacctcgacctcaagaagcacatggactcctccacggacttcaagaaccaccgcatagtcaaatccttcctctaccagattctgcggggcatcgcctactgccactcgcaccgcgtgctccaccgcgacctgaagccgcagaacctgctgattgaccgccgcaacaacctcttgaagctcgcggactttggactggcgagggcgttcggcatccctgtccggacgttcactcatgaggtggtgacgctttggtatagagcgcctgaaatccttctcggtgcaaggcattattccacccctgttgatgtgtggtcagttggttgcattttcgctgaaatggtgaaccagaaggcgctttttcctggcgactctgagatcgatgagctgtttaagattttcagaattttgggcactccaactaaagaaacatggccaggcgttgcttcgttgcctgattacaagtcaactttcccaaagtggccacctgtggatcttgcaacggtggtcccgacactcgaaccgtcgggaatcgatctcctatctaagatgctgcgtctagatcccagcaagaggatcaccgcccgcgccgccctcgagcacgactacttcagggacctcgagcacgcctagcaggatatggatggatggatggatgaaccgtttcccctcccctgctccctctgtaaattacggtagcagccgcgatgcttggggccggcgagtacccccgtctgggcggccgttgagttatgtgtgttactctatagtatgactaagctggagtgcctcatgtccaccatgcagtgcagcttttttctccgacttttttttgctgcgtagagaaatgagatgagaaatgtgatccagagatccttgtgccatgggagacctagtagtagactagtagctatgtaggtgtcggcactggcctctcttgaacctgtatgatggctggagagagaggagagacggcggcttctctggttgataagttggtcctggtatggtgtgcttgccgccgatgcacgtcatggtctttcttcctttctgatgaggacttggggtggacgccgagtgagttcgtgctcatgcacggtttgttggccatgcaagctgaagcagctgcagcagagattttggaaaaaa

SEQ ID NO: 334 - DNA, 1993 bp, Zea mays
ggctcgagctcgccgctgccgcatcctcaccctcgtccgctcctccgctgccccaaaccctagcctgaggaggggtcctcctccgctaccgagacccacgatgtcgaccatcgctgcctcccgccgctcgtcctcctcgtcctcttccgcgaccgccaagcgccccgcgattgcggacggccccgggggacccaaggcgaccgccgcacaggccaagaagcgcgtggcgctcggcaacatcaccaacgttgccgcgcggggagggagggcttccgttggcggcagccttgggaacgtcatggcgcccaccagcagcgcgaagttgaatccaacggtacccttgaagaagccgtctttggcaacaagtgctcggagtgtgagttcttccatccggggttctgctgacaaaccggcttccatcaagccagctccaccagtagcacgccatggcagcgcaacacaaaggcataacaatgttcctcctcctaaagtgcctaccattgccgatgtgccaagtcgtgctcctgccttggtgtcctgcaccggcttggtgtctcctggacgctcaggagattctgtttcatccgatgagacgatgtcgacttgcgactccatgaaaagcccagactttgagtacgtagacaatcaggacacctcgatgctggcttcgttgcagcgacggacaagtgaacatctgcgaatatcagaggatagagatgttgaagaaaataagcggaagaaaaatgccgtggccccaatggaaattgaccgcatctgtgatgttgacagtgaatatgaggatccacagctgtgcgctactctggcttctgacatttacatgcacttgcgagaggctgagacgaagaaaagaccgtcaactgatttcatggaaacgattcaaaaagatgtcaacccaagcatgagagcaattttgatagactggctcgtggaagttgctgaagaatatcgtcttgttcctgatactttgtacctgacagtcaactacattgaccgttatctttctggcaacgaaatcagccgccaacggctgcaattacttggtgttgcatgcatgcttatagctgcaaaatacgaggagatatgtgcaccacaagtagaagaattctgctacataacagacaatacatatttcagagatgaggttctagatatggaagcttctgtactgaattacttgaagtttgaaatgacagcacctacagcaaagtgctttttgaggagatttgctcgtgctgcacaagcgtgtgatgaggatcctgctttgcatctggagttccttgccaattacatcgctgagctatcactactggagtacagtctactctcttaccctccatcactaatagctgcatcggctattttcttggcgagatttatactacagccaacaaagtatccttggaattccacactcgctcattacacacagtacaaaccgtccaaactgagcgaatgtgtaaaggcattgcatcgcctttgcagcgttggttctggtagcaaccttccagcaatcagagaaaagtacagtcaacataagtacaaatttgttgcaaagaagcagtgtccaccgcagataccctcactcgaattctttcgggacgcgacatgcctagactagaaacccagaagtgattccagttgcttactggattcttcttgatgtgtcttgaatgcccagtgtagcacagcacaactatgcaagtgctgataacccccaggttgtttcaggtgattacaggggtgtaatcaatgtttgtggtcatgttaggtcattggtgtggtttttcttttcctgcttccagtctttctgtatgtagatcagtgttttcaggcgcttgtaaatccgagttctgtagtagagcacaatatcttgtaagttaactgaagaaatttggtgatcaaccaagttacctacaacttatgttgagctggtgatcaggtttttgcgctagttgaaaaaaaaaaaaaaagg

SEQ ID NO: 335 - DNA, 784 bp, Zea mays
acgcggggcatatccactattctctaggaagcaagggaaccacatcgccatggcagccaagatgtttgcattgtttgcgctcctagctctttgtgcaaccgccactagtgctacccatatcccagggcacttgtcaccactactgatgccattggctaccatgaacccatggatgcagtactgcatgaagcaacagggggttgccaacttgttagcgtggccgaccctgatgctgcagcaactgttggcctcaccgcttcagccgtgccagatgccaatgatgatgccaccgatgacaatgatgccgatgtcgagtatgatgccatcgatgatggtgccgactatgatgtcaccaataacgatggctagtatgatgccaccgatgatgatatgccaagcatggtttcaccaatgatgataccgagtatgatgccttcgatgatgatgccgagtatgatgccttcgatgatgatgccgagtatgataccaccgatgatgatgccgagcatggtgtcaccaatgatgatgccaaacatgatggcagtgccacaatgttaccctgattccatctcgcacattatacaacaacaacaattgccattcatgttcagccccacagccatggcgatctcacccatgtttttacagcagccctttgttggtgctgcattctagatataagcatttgtgttgtacccaataatgaagtcggcatgccatcgcatgcgactcattgtttaggaataaaacaagctaataatgacttttctttcattataaattt

SEQ ID NO: 336 - DNA, 1073 bp, Zea mays
acgcgtccggtcgcacatatctactatactatactctaggaagcaaggacaccaccgccatggcagccaagatgccttgcattgttcgctctcctagctctttgtgcaagcgccactagtgcgacgcatattccagggcacttgccaccagtcatgccattgggtaccatgaacccatgcatgcagtactgcatgatgcaacaggggcttgccagcttgatggcgtgtccgtccctgatgctgcagcaactgttggccttaccgcttcagacgatgccagtgatgatgccacagatgatgacgcctaacatgatgtcaccattgatgatgccgagcatgatgtcaccaatggtcttgccgagcatgatgtcgcaaatgatgatgccacaatgtcactgcgacggccgtctcgcagattatgctgcaacagcagttaccattcatgttcaacccaatggccatgacgattccacccatgttcttacagcaaccctttgttggtgctgcattctagcatagaaatatttgtgttgtaccaaataatgagttgacatgccatcgcgtgtgactcattattattaacaataaaacaagtttccttttatcaaaaaaaaaaaaaaaaaaaaaaaaaaaaaaaaaaaaaaaaaaaaaaaaaaaaaaaaaaaaaaaaaaaaaaaaaaaaaaaaaaaaaaaaaaaaaaaaaaaaaaaaaaaaaaaaagggtttgccaaaaaaaaaaagtttgcccctgggccgaaccccccttagggggaattcccaccccctggggggcggttattgggggacccagcctgggcccaaacttggggaaaaaaagggcaaaagttgttcccggggaaaaattgtttcccgttaaaattcccaaaaaaaatacaacccgaaacaaaaaagggaaaacccggggggcccaaagggggggccaaccccaattaattggggtggccccaacggcccctttccaagggggaaaccctgtcggcccatttgattaaaaaaatcccccaccccccggggaggggggtttggcttttggggcctttttccctttcctgg

SEQ ID NO: 337 - DNA, 1170 bp, Zea mays
ccggccggggggatcgagtccgcctacgtctcccgtcgttcacctcccggctcccagtcccactgcctctctcgctctctcgtggcttcctggcggcgactgggcgagcgccgccgccctcttcgtcgggcccgcccttcaccggcgacgtgcatccctccggagaagaatattgcgctcacataactgaataactgatattaggatgagtctctgtacaatagcacgacggctatgtctttcaaaaccatcctctggcagtcgtctttcagcaatttgggctcatctatacagcactgaggctgcaaaggacatgggtgctaagaagtacaagtaccccgatgtatacgacccctacgggcctatgccgccgccttcggagaaagtcgtggaactagctgatcgcatcgctgctctccctcccgaggagatcaaacagattgctccagcccttctcctcagactgaaccaggagccgccacaggcggtatctgggccagggtttcggtttcggtgcccaggtcggctctggggcaggttctggaaaggctgagaagaaagccgagaagacagtcttcgacgtcaggttggagaagttcgacgctgctgcgaagatcaagatcatcaaggagatcaggacgtttacggatctggggctgaaggaggccaaggagctggtggagaaggccccagtcgttctgaagcaatcgctcacaaaggaggaagcggaagcgatcatagcaaagataaaggcagctggcggtgttgctgtgatggagtgaatgatagatgatcatctagacatcacgccttcttttttgtttcatatttttgttgccatgttcaggtatttgagattgcacattgcagtgccactgtgcagatggaggaaatagactagttcacagctacgttggtaacaagggagagatggagagtagagattagttgctatgatgatagtcatgacttgttctagaataagcagttctttgggctctacacagcttttctggtggagtgaatgtatgtggccatcagggccaacgatatgaatcttgtgctcttgttgtatctgctatgagttataaacacttcgcagttgcttaagtaaatgataaaaaaaaaaaaaaaaaaagctcggccccccggcccagtcagtcccggtcc

SEQ ID NO: 338 - DNA, 1478 bp, Zea mays
gaagaatgtaatgagccactttgtattattattattgttattattacaaaccgacaatctttaaagggctgagccaggacaaactcgaactgaactgtaatttagaatgaatggagggaccactgaatcgaagcatcatgcaatgatgtaacatttcttcctttttttaaacaaaggaatcgttgattttatattgataacatattgttgcaatttgtaaaaaagcaaccttgccgaatggatcattattaattgtgctacttctgcaacattgttctccaacgtgcttgctaacacagcctatatcgcgtcaatacgactagttcactggcatggtagcgcgttcttcatgctcctggcgtatttctctagcctcttcaatccttccttgggagaggctgcttcgcctaactgtctcaccattgcgctaccaatgatcacaccatctgcaccccactctgcaatctgctttacatgctcaggtttcgatatgccaaacccgacagccacgggtatgtcagtgacctgtttaacctcctgaatgagagactggacacgtgtgttcacgtttgcgcgtggacctgtaactccattgacgctcgcgagatagacgaatcctcgtgaagctcgtgttatctcctccatcctgtccgctggcgtagatggtgttgtgagcagcaccagctcgaggttgttcttgatggcttcggtcctgagagtgagagcgcacgagttcccatacgggaggtcgggaactatgaggccgtgcacgccggcttccttgacggcggcggcgaagtcggccaggccccaccgcacgatggggttgaagtaggagaagagcaccacggggcaggacagctccggcgtcacctccttcagcatcgccagcacgccgtccggcgtcgtgccgctcgccagcgcccgcgccgccgacgcctggatgaccggcccgtcggcgtaggggtccgagaagggaacgccgagctcgatgacgtcggcgccgcaggcgtccaggagccgcagcgcctccgccgtcgtcgccaggtccgggtcgccggcggtgatgtacgggatgaacgccgtcttgccctgcgccctgagcctggacatggtctgcgacaccggcaggcatcggccgccggcaccggcggtgagcttggccggcgccgccggggcagccggagctaccgcggcgaccgcccttacagtggactgccgccggggacgaagaccaccgggaggaggtcgatgcagccttgatcgcggaggccatatgtctctagtacgggctcacgtactgtggttcgatttcgatggatcggttggagctggtttatacggccgctacggtgtgggggagcaaagtcactgggggcctgtggcttcgctagctagcttcacgagcagctgtgtgcaactgctcagctcgaactctggaacgccggcagtagcccacgcgtccgcccacgcggccg

SEQ ID NO: 339 - DNA, 1640 bp, Zea mays
actccatagggcgattgggttcctcaaggccggccggacacgccgtccctcctgctcctgctctccacacgccgccggagaaacgcggcggaacgcccagcacgggctgcacggcaggtcggcactcggtagcacatccctcccggtggtccggccctccgccgtcccagcacgacagcacttccggcgaccaggtcctaggctcccagcgtccggcggtcccagcagtccagcacgacagtgacagcacttcgggaccacggctccgcgcgttctgctgtgcagggagggaaaatcctttttggaggatctgccattgaatcagaaggaaactttgtgcaaccaacaattgtggaaattacacgttctgcaccagttgtgaaagaagaactctttggtcctgtcctttatgttatgaaatttcagaccttgaaggaagcaattgaaatcaataactctgttcctcaaggattgagcagttttatatttacaaagtggccagatattatttttaagtggctcgggccccatggtagtgattgtggtatagtgaatgtgaacatacctactaatggtgctgaaattggtggagcatttggtggagaaaaaacacctcctggtgtgcgacaaacagggagtgattcctgaaaacagtacatgagaaggctgacttggtaagagtatacacatttttgttgtcagtgcatttgaaatgcgcactagatataatcattattacagcagtgcactagtaagggtagcagggccgggcctaagcacgtgtagcaagtgttattttgcaatggatttataagtagtctactaatgatttgggttttaattttgtcaggagggaggtcctagaggtagtaagtcacttgtttactccatgatgacaatagcaagcagatcgcggtggtgcctatggatgctacaacaagaaagatcaaaagttcttttggatggatgcagctagatattttgttttgtattttgtccaaaagagaaatttgcaacgttgtgaatgatattataattgtgatgcttttgtgaatatataattgtggtgcttttgtgtttatgtgatggatcaatgactgtgttatactgataaactgagtctgtcggaaaaaaaaaaaaaaaaacccgcgggcgacttgtacaatcaactatgggagcgagctacctctagcccagggaatcaattttggttaatcctgcagaaatgttgcgcgtggatctcagtgttttctgcagacgtggatgccgtatggaaagaactgatgcaaccgcatttgagatctcagcagacttgagcagcatttattggcgtcagttgtgaaacttaaactgcaggagcatcttgtacataaataaaataagatgtttgttgctcgtgggccgtggcacgttttggtaccggtgtccagtctactaataaaatctaatgcaaaacggtcataactacattctcatgcagtatgattttccggccttttgatctggaattgaaatgagcgttgttcgttttgaacaaaaaaaaaaaaaaataataaaaaagttgtaatatcttatcttgcttgtgaaatcgaataggcctatatatgttatgctgttaaaaaaaaaaaaaaaaagcggcc

SEQ ID NO: 340 - DNA, 2457 bp, Zea mays
tctctctcctctcatctccacctctcctccggctagggtgttcacgcctgccgcggcgaagcttctgccctccccggcgtcgcgctctggtcgtcgtcggccgggaagatggctggcggcttcagggtacttcatctggtcaggccctttctggctttcttgccagaggtgcagagcgcggataggaagataccattcagagaaaaagttatctacactgttatttctctcttcatttttctggtgtgcagccagctcccactctatggcattcattcgacgactggagctgatcctttctactggatgcgtgttatcctcgcatcaaaccgtggcactgtgatggagttgggtattactccaattgtgacctctggtatggtaatgcaacttcttgtcggatcgaagatcattgaagttgacaacagtgtgagagaggatcgtgctctgctgtaagtgttgtctttctaaaaatattgtgaccttcaattatcacaattctaatcgtagcatttctctatcaagtctgccatagtagattataaaccttctgatctgtatttaatatatttgtattgtgatgcacattgcatttctttactcaggaatggtgcacaaaagttgcttggtatcttgatcgctattggggaagctgtggcatatgtcctgtctggaatgtatggcagtgtaagccaacttggaacagggaatgctattctcattatacttcagcttttctttgctggcatcattgtcatctgtttggatgaacttctccagaaaggttatggtttgggatctggtatttctctgttcattgctaccaatatctgtgagaatatcatctggaaggcatttagccccacaaccatcaacagtggtcgtggtgctgaattcgaaggggctgtcattgcactgttccatctgttgattacgagaaccgataaagtccgtgctcttcgtgaggctttctaccgccagaaccttccaaatgtgaccaatttgcttgccactgtcttggtattcctcatagttatctatttccaaggcttccgtgttgtgcttccagtgagatcaaagaatgctcgtggccagcaaggctcatatccaattaagctgttctacacttcaaacatgcccatcattcttcactctgcgctgattaccaacctctattttatatcccagcttctctacaggaagtacagtggaaacttccttgttaaccttcttgggaagtggaaggagtctgaatactctggccattctattcctgttggtggtcttgcttactatgtaactgccccatcaagtttggctgatgtccttgcaaatccattccatgcactgttttatgtggtcttcatgctgtcagcctgtgctctgttctcaaagacatggattgaagtttctggttcatcagcaaaggatgttgctaagcagctcaaggaacaacaaatggtgatgccaggccatcgtgagtcaaacttgcagaaggaacttaaccgatacatccccactgccgctgcatttggtggtgtatgcattggcgcattgaccgtcctggctgatttcatgggtgcgattggttcaggaactggtatattgctcgctgtgacaatcatataccaatacttcgaaacctttgagaaggaaagggcgactgagcttggtttcttttggtttttgattagtagctgtggaaccttaacttggctatagctgaattttcttgttagcgtgggggtatgtgctacagatccatttcgtcgaatggaatactttctcagacaactagaaaccattggattttgcggtgtgcaaaacttcccaaccgtaggtctgtttgatgggaattttagacagaatttggaggaaactggaatggggtacagcatggaagtggagatgatttcaatggctcatcgcatgggtttccttactactccatatgctttcaatccggatgaagctgctgccatggccaaggcaggagctcatatcgtagttgcacatatgggtctgacgactgcagggtctatcggggcaatgacagctgccactttagatgatagtgttttacgtgttcaggccattgcggatgcggcatttggggttaatcctgatatcattgttctctgtcacggaggccccatatctggacccctagaagccgagttcgtattgaagaatactaaaagggttcatggattttacggtgcatcaagcatggaaagattaccagtagagcaagctatcacgaacaccatgagagagtacaaaagaatttccttaaaatgagaaccatcgtttacatgcgtgatttaagcctgctgttctttcgttacacttcgcagattctgtcatctctgcctctttatttgtcatatacattttcttaccaatggacccttcttgttggaaaaaaatcataaaaaatgttttttttgacgaggc

SEQ ID NO: 341 - DNA, 1743 bp, Zea mays
cccacgcgtccgaatttagagtatacctagcaaacttggttaattgatcgatgttggttgctctgatgtttgcagcatcccgttgccgccatgggtgctggaggagatgagcagcaacccgaacatcgtatacacggacaggtccggacgccggaatcccgagtacatctccctcggctgcgacacacttccagtgctcaggggccggacccccatccaggtctacaccgactacatgcgcagcttccgccagaggttccgtgactacctcggcaatgtcatcgcggtaattaaccagccaccgttactacgatcacttaacgttgcaatagcagttgaccataaaaatgccatgcatgatgttgtgatcttaggctaaaccactcgtgtctcactgttgcaggagatccaagtgggtatgggtccttgtggagagctgaggtatccttcgtaccctgaggccaacggaacatggcgtttcccgggcatcggggagttccagtgctatgacaaggtaggcgcacttgattggaaaggtattcggagttgccggtgaaagtttgctgagttgttgtgcgttggtacagtacatgcgggcatcgctggaagccgcggcggtggcgtcgggccacgaggagtgggggaggggcggaccgcacgacgccggcgagtacaagcagatgcccgacgacacgggcttcttccggcgcgagggcacgtggagcaccgagtatgggcatttcttcctggagtggtactcgggcatgctcctggagcacggtgaccgcgtcatggccgcggccgaggccgtgttcggcggcacgggcgcaacgctctctgccaaggtcgccggcatccactggcactaccggacccggtcccacgcggcggagctcacggccgggtactacaacacgcggggccacgacgggtacgcgccgatcgcgcgcatgctggccaagcgcggcgctgtgctcaacttcacgtgcatggagatgaaggacgagcagcagccgcagcacgccagctgctcccccgagctgctggtgcagcaggtcaaggctgcgaccagcgccgccggcgtgcagctcgccggcgagaacgcgctggagcggtacgacgatgcggcgttctcgcaggtggtgtcgacggcgcgcggcgcaggcctggccgcgttcacgtatctgcgcatgaacaagacgctcttcgacggcgacaactgggggcggttcgtgtccttcgtcagggctatggccgacggtggcgcgaggccagcgctgccgcggtgtgacacggggcactcggacctgtacgtcgggtttgtcgacgccgccaaggagaggaaggcggcggaggccaagggcgccgccaccaccgcagcattgtaggtggtcgtcggtagatgcccatgcatgtgcttgcataatgcatacagacacatgcgccgagctgttgtataacgtacacaggagaactgtataaattcagggccttcaggttgcaaagttttataggctgtaatcgagcaggtagataaggaggcaggcatgtcagaacttaggctatcttcagtttatttgttccatttcaaactgtattataaggagcagcttggtgactttcactgtcataaatttagctgaaggaaaatagaaatgccaattactacaaaaacatcaatgagggcggccagtagtacgagaacacggacaggagggagtatgccatggaggagcacgggct

SEQ ID NO: 342 - DNA, 691 bp, Zea mays
gggaccctcccggtcgccggagtagccaccattccgggtttggtgctggccggtgtcgtacgactccggtcgtccatggggaggtctccttgctgcgacgagaatggcctgaagaagggcccctggactcaggaggaagacgagaagctgctgcactacatccagaagaacggacatggtagctggaggaccctgccgaggctggccggtctgaaccgatgcggcaagagctgccggctgcgctggaccaactacctgcggcccgacatcaagcggggcaagttctcgcaggaggaggagcagaccatcctccacctccactccgtcctcggcaacaagtggtccgccatcgccacgcacctccccggccgcaccgacaacgagatcaagaacttctggaacacgcacctcaagaagcgcctcatccagatgggcttcgaccccatgacgcaccgcccgcgcaccgacttgttcgccgcgctgccgcagctcatcgcgctcgcagccctccgcgagcagctgtccgccctctgctcgccgcaactgactgctgctacgactgccccgtccgcggacgacggcgaccgccagtcgtcgtacctaccgtgcacgttccccgtcagtagtgacggtcaagaagctgccaaccagcaacagcaaacaggcctcatcagctatgacggcggccctc

SEQ ID NO: 343 - DNA, 1550 bp, Zea mays
ttgggtacctcgaggccggccgggacgaagcgtcggcacgcggtgccgactcaccgactcccctcgcaagtcgcaatctccactctccagagtccaaactccactcctcaccgatgatggcctcgcaagcgatggtaccgctgcggcagctctttgtcgacggcgagtggcgcccgcccgcgcagggccgccgcctccccgtcgtcaaccctaccactgaggctcacatcggcgagatcccggcgggcacggcggaggacgtggacgccgcggtggcggcggcgcgcgcggcgctcaagaggaaccccggcggcgcgcccgccaacgtcgcctgcgccatcgccaagctcggcggctcctccgccttcgtcggcaagttcggcgacgacgagttcgggcacatgttggtgaacatcctgaagcagaacaacgtgaactcggaggggtgcctgttcgacaagcacgcgcggacggcgctggccttcgtgacgctcaagcacgacggggagcgcgagttcatgttctacaggaacccgagcgcggacatgctgctgacggaggcggagctggacctgggcctggtgcggcgcgccagggtgttccactacggctccatctcgctcatctccgagccgtgccgctcggcgcacatggccgccatgcgcgcagccaaggcccgcgggcgtgctctgctcctacgaccccaacgtgcgcctcccgctctggccgtcgcccgacgccgcacgcgagggcatcctcagcatctggaaggaggccgacttcatcaaggtcagcgacgacgaggtggccttcctcacgcgcggggacgccaacgatgagaagaacgtgctgtccctgtggtttgacgggctcaagctgctcgtcgtcaccgacggggacaagggatgcaggtacttcaccaaggactttaagggcagcgtgcccggcttcaaggtcgacaccgtcgacaccaccggcgccggcgacgccttcgtcggctccctcctcgtcaacgtcgccaaggacgactccatcttccacaacgaggagaagctccgcgaggctctcaagttctccaacgcctgcggcgccatctgcaccaccaagaagggcgccatcccggcgctgcccacggtcgccaccgcccaggacctcatcgccaaggccaactagatggccgcacgccccgccgttccaccacgtcactgtcccccgccgccccgcccctcgtcgtcgacgtcctcggtttcggttcattaggtagatcgagtcttagcgtccgtctctgcgcctctacgctgagacggtttgtttgggttaattaagttagctttcgtggagatttcgccccggggcatcaataaaatgttggcatgcgtggtgggatgctatccttttttttattttattttattttatttttagcttggatcagttggggttttgaacattgctagtgtcgtgtgattgggaaggctaatgtgatgccttcgatgcagagttttcaatgaatgccttggtgcaaacgtaaaaaaaaaaaaaaaaaaagc

SEQ ID NO: 344 - DNA, 1567 bp, Zea mays
  misc_feature (42)..(42): n is a, c, g, or t
ccaaaaacaataaaatttaatatccaaaaaaaataaattgtnaatcttacataggcatccaaggtcaaaacattgtaatgattctttgcgttgaagcttatataacatcaaaatccaagccggttttttttttttttttgtcaaaaacccatgagtcaaaaataagcaagggaatcacaacgccatggcagggcatatccactattctctaggaagcaagggaatcacatcgccatggcagccaagatgtttgcattgtttgcgctcctagctctttgtgcaaccgccactagtgctacccatatcccagggcacttgtcaccactactgatgccattggctaccatgaacccatggatgcagtactgcatgaagcaacagggggttgccaacttgctagcgtggccgaccctgatgctgcagcaactgttggcctcaccgcttcagccgtgccagatgccaatgatgatgccaggtatgatgccaccgatgacaatgatgccgatgccgaatatgatgccatcgatgatggtgccgactatgatgtcaccaataacgatagctagtatgatgccaccgatgatgatgccaaacatggtttcaccaatgatgatgccgagtatgatgccttcgacgatgacgccgagtatgatgccaccgataatgatgccaagtatgataccaccgatgatgatgccgagcatggtgtcatcaatgataatgccaaacatgatgacagtgccacaatgttactctgattccatctcgcacattatacaacaacaacaattaccattcatgttcagccccacagccatggcgatctcacccatgtttttacagcagccctttgttggtgctgcattctagatataagcatttgtgttgtacccaataatgaagtcggcatgccatcgcatgcgactcattgtttaggaataaaacaagctaataatgacttttctctcattataatgtaaaaaaaaaaaaaaaaaaaaaggcggaggcacgaagccgggtcttatggacccggggagaccaagccgaaggaaccgatgcgaactggctggcctcatccgaggatgatgggcaaggcgaggaggaagaagggaggaataaaggagaagctgatggagccggtgaagcaacgatggatctgggcagcaattcccacactgaatctgggctacatgtttagcaacagcataacctaagctcaaattaccacttttgtgataaccaaaggacatagccggtcatcccaaacaacatatgtaacaactgggcagctaaaggaccaaaccgctttttacagtagaaatataacaaaaagttttgatggacctgatcaacagccaatggctaacggggtaagatacatttaaatgccccgggggaaacctacttcccagctgaatcaggggagccatccccggaagaaaccaaaccttttttgcctccacgattagggctaccaaacaatgacaaaactggggacccggactgagatttctcatcacttgcatgcttcactgatggggaatcaggtggagagggatgatgcact

SEQ ID NO: 345 - DNA, 3802 bp, Zea mays
  misc_feature (3767)..(3767): n is a, c, g, or t
aattcggcacgagggagcgacgaagccaaagcaacacaccagcgcgcacgcacgcgcagcgtccggcgggcatcaccacctcctgtcctcctccctcctgccccgatccgccctccccgccgctcgccgcacccgatgtcggccgccgacccttccgcggctccggccgcggccgccgacccggacggccctgactccgtgcggctcacctggaatacctggccacggtcaaaggtcgaggccagccgctgcgtcgtgccgctcgccgccaccatctcgcccactcgcgtcccggatccctccgcggcatccccgccgccgctcccttaccctccgctccgctgcaagcctccctgttccgcgctcctcaaccccttcgcgcgcgtagacttcgctgccaagatctggatctgcccgctctgcttctcccggaaccactttcccccgcactatgctgccatatctgagtccaacgtccccgccgagctcttcccgcagtgctccaccgtcgactacatcgtcggcggagccggcatccctggggtaggcggcgcgccgccgcccccgccgcccgtatttctcttcgtcatcgacacctgcgtcatcgaggaggagctggagtacgttaagatggccatgcggaaggccgtcgcgctcctgccggagcacgcactcgtgggcctcgtcaccttcggcacgcaggtgcacctgcacgagctcggattctccgatctcagcaagatctacgtcttccgggggaccaaggagatctctaaggaccagattttggatcagcttggcctggcgggtgctgggcggccgggcttccccaagatgccacagcaaccgggcgggccacaggtgaatgggatgcatccgccgtccacggccggggtcaacaggttcctgctcccggtgtcagattgtgagattgctctcagcacgttgctggacgagttgcagcctgaccaatggccagtcgaggctgggaaccgtgcgatccgttgcactggtgttgcgctcagtgtagctgctgggttacttggtgcttgcatgcctggaacaggtgcaaggatcatcgcattgctaggtggtccgtgtactgagggacctggaatgattgtttcaaaagatttgtcagaaccagttagatcacataaggatcttgacaaggatgcagctcctcacttccagaaagcagttaaattttatgatggtcttgctaagcagttggtcagtcaaggtcacgtgttagatgtttttgcttctgctctcggatcaggttgggctagctgagatgaaggttgctattgagagaacaggtggccttgttgtcttgtctgaaagttttgggcattccgtattcaaggattctttcaaacgcatttttgagggaggtgaacagtctctaggactttctttcaatggcataattgaaataaactgttcaaaagatattaaagtccaaggtattattggaccatgcacatctttggagaagaaaggagccatgtgctctgacacagttgtcggtcaaggaaatacatcagcatggaaaatgtgtggtctcgatagaaatacttctcttacagtattttttgatgtctcaccgagtgaacgatcgagccagccaggaaaccaaaatccccatttgtatatacaatttgtgacaagttaccaacacccagaaggtcaaatgaggataagagttactacgatatgcaggaaatgggtagatggttccactaataccgaggaattagttgaaggttttgaccaggaaactgcagctgttgtgttggcaagatacatctctttgaaaatggagatggaggaagagttcgatgcaacccggtggcttgatagatctctcatacgtctttgttcaagatttggggattaccggaaggatgatccctcttcatttagcctgcattcaaatttctcattgttccctcagtttatgtttaatcttcggcgttcacaatttgttcaggttttcaataacagtccagatgagacagcttatttcaggatgttactcaatcgtgagagtatcactaactcggttgccatgatccagccttccttgatatcattttcttttgattcacctccatctccggtatttctagatgtggcatcaatagcagcagatcgtatactgctacttgatgcgtactttagtgttgtcatttttcatggaatgacaattgctcagtggagaaacatgggttatcagaaccaacctgagcatgagcaatttgcacaactattacaagcaccacatgaggaggcacagatgataataaagggtcgatttccagttccaagactagttgtctgcgaccaacatggctcgcaggcaaggtttttgttggctaagctgaatccatcggccacatataactcagctcatgatgttgctcctggttctgacatcattttcaccgatgatgttagcttccaggtcttctgtgagcacctacaaaggctggctgttcagtcttgaggacctacctgtatgcaaaggttgtacaccctatttgatagttgctcataatgcactgggttcttaggttggagttgtgagaatttcccttttctgtttctctttggccatagttttctgagatcagacaattttttcgggaaactgccctaaaggaatgtgtaagttgcctacagaggtctattatctacatatatagtatatatacttatttatgttgacatcatattttttttttagtagaaaacggtccatgcaggtattgggcttaaattacaatagccgtaaatagtatctgtttaagaaatataataggtattggaccatgcaggtaagtgccaatcgttcacccttttgatccacaacgggatggaggaagcagtggctccctatccaaattattacaaaatgacatgcaaattattgagataatcttgatgattatgatgaaggtgcgtctggttgatttttaggaagcgcggcttggaatgcgggaatttgcatgtatgcatcatggagcctctccaagattgggtacatcgacatatcgatttggaagcgatttatgccggcatgtatctgtggttcaaggaacacatctgccaattggacatcatctccagtagcatatttactctcacatccttccaacagcttttcgatcgctctgaatcccttgtcaatataactttgaacaatatgaaggccctcatctgggctcatcctaccctcgtgcagaccaataacagcatagccttgaagaggttgaatgcttgaacaaacaatgtttgcaatctgaagattaagagctttcctcttgagatctttaggcaggagtggatgctcaggatacttatcttccaaatacaatgagatggcaagagaatcagaaacgactatgtccccatctactaatgctggaatatatttgattggattgattttttcataatctggatctgtcctagggtttaccgacttgtactcgtaatccacacctttgaggttgagtgcgatgcgaacacggtgggagcaggagctgatccaggcgttgtacaggatgggcttctcggtcgccatggccctcagctcctccttctcaatcaacgggcaaccagatgcagatggtaatgagatacagcaggtgaagcccccaagtctccggtctgctcctaattccttgccttgagtataatatagaagatggagctgcaccgcactgctagctggcggggcgcgggggtccccagaaagncggtacttgcccccggccggcctcgagggtcccaa

SEQ ID NO: 346 - protein, 459 aa, Zea mays
  misc_feature (92)..(93): Xaa can be any naturally occurring amino acid
  misc_feature (260)..(260): Xaa can be any naturally occurring amino acid
  misc_feature (348)..(348): Xaa can be any naturally occurring amino acid
SRPGLGVSQNPTQPSTRKKTTSSHHHRQQEQRGETARVYVPPGAAAAMAAAATTSSSSHLLLLSRQQAASLRCRLSFLGQPRRPGRVTAQAXXAAKDVRCMAAVDTTAASTAAAETSRYEIVTLTTWLLQQERTGAIDNEMTIVLASISTACKQIAALVQRAPISNLTGVQGAVNVQGEDQKKLDVVSNEVFSNCLKSSGRTGVIASEEEDVPVAVEQSYSGNYIVVFDPLDGSSNIDAAVSTGSIFGIYNPNDECLADXSDDNDTLDSVEQRCIVNVCQPGSNLLAAGYCMYSSSVIFVLTVGTGVYVFTLDPMYGEFLLTQEKVHIPKAGKIYAFNEGNYALWDDXKLKLYMDSLKEPGDSGKPYSARYIGSLVGDFHRTLLYGGIYGYPRDKKSKNGKLRLLYECAPMSFIVEQAGGKGSDGHQRILDITPTEIHQRVPLYIGSVEEVDKVEKFLA

SEQ ID NO: 347 - protein, 211 aa, Zea mays
  misc_feature (8)..(8): Xaa can be any naturally occurring amino acid
EYATDSRXGQILERYERYSYAEKALISAESESEGNWCHEYRKLKAKIETIQKCHKHLMGEDLESLNPKELQQLEQQLESSLKHITSRPSHLMAESISELQKKERSLQEENKALQKELAERQKAVASRQQQVQWDQQTHAQAQTSSSSSSFMMRQDQQGLPPPHNICFPPLTMGDRGEELAAAAQQQPLPGQAQPQLRIAGLPPWMLSHLNA

SEQ ID NO: 348 - protein, 242 aa, Zea mays
  misc_feature (1)..(1): Xaa can be any naturally occurring amino acid
  misc_feature (114)..(115): Xaa can be any naturally occurring amino acid
XHASVPPLPSPNPLLGQTASLSYSSASSRAVREPRVVVQTTSEVDILDDGYRWRKYGQKVVKGNPNPRSYYKCTNPGCSVRKHVERASHDLKSVITTYEGKHNHEVPAARNSGXXGSSSAPSASQAGGSHRRQEPAQASFAHFGTASFSSFGLPPSGQLGPTTGNFGFGMVPPGMTIPVPSLGSLAPVKMVGNSSAMQGYPGLMVPGEPKVEPVSQPLIQMANASPPAYQQILSRPPFGHQM

SEQ ID NO: 349 - protein, 364 aa, Zea mays
MASMESLIGMMFCIQRACTALGDHGGGSDLPTLWESLPTIAVVGGQSSGKSSVLESIVGTDFLPRGSGIVTRRPLVLQLQQTEDGSQEYAEFLHMPKRRFSDFALVRQEIADETDRLTGKTKQISPVPIHLSIYSPKVVNLTMIDLPGLTKVAVEGQSESIVQDIENMVRSYVDKPNCIILAISPANQDIATSDAIKLSKEVDPTGERTFGVLTKLDLMDKGTNALDVLEGRAYRLQNPWVGIVNRSQADINRKVDMISAREKEREYFETSPDYAHLSSRMGSGYLAKLLSQHLESVIKAHIPSITATINKTIDELESELDIIRRAVAADPGAQLDTILDLCRAFDRVFKEHLDGGRSGGDRIY

SEQ ID NO: 350 - protein, 227 aa, Zea mays
  misc_feature (36)..(37): Xaa can be any naturally occurring amino acid
  misc_feature (52)..(52): Xaa can be any naturally occurring amino acid
  misc_feature (206)..(206): Xaa can be any naturally occurring amino acid
  misc_feature (227)..(227): Xaa can be any naturally occurring amino acid
CRRVSTSVYAILAVAVVFAYVMAQLLVLTFAKEKVXXTSSSGCSVPLLSRVXHPSKDGKRSIVASQKPEHKWRKDLILIGTFAASVTYQAGLLPPGGLWPDDRDGHFTGDPILHDADPRRYKAFFYCNATAFMASVVIVILLLNSTISKYRRSLLPMKTAMVLDLLALLGAYAAGSCRKLKTSVYVFALVVAVFMYIVVHILLFNXYVPKYLSQYLFFPKKKKKKRX

SEQ ID NO: 351 - protein, 515 aa, Zea mays
  misc_feature (515)..(515): Xaa can be any naturally occurring amino acid
EDATSSSSGLWRAASIESRGTEKMAMTRPFLAPLMIVAAVLLSRMAAAAADDGDVLLQVKSAFVDDPQGVLAGWNDSAGSGAGSSGFCSWSGVACDASGLRVVGLNLSGAGLAGTVSRALARLDALEAIDLSSNALTGPVPAALGGLPNLQLLLLYSNQLTGQIPASLGALSALQVLRLGDNPGLSGAIPDALGKLGNLTVLGLASCNLTGPIPASLVRLDALTALNLQQNALSGPIPRGLAGLASLQALALAGNQLTGAIPPELGTLAGLQKLNLGNNSLVGAIPPELGALGELQYLNLMNNRLTGRVPRTLAALSRVHTIDLSGNMLSGALPAELGRLPQLTFLVLSDNQLTGSVPGDLCGGDEAESSSIEHLMLSMNNFTGEIPEGLSRCRALTQLDLANNSLSGVIPAALGELGNLTDLVLNNNSLSGELPPELFNLTELQTLALYHNKLTGRLPDAIGRLVNLEELYLYENQFTGEIPESIGDCASLQMIDFFGNRFSGSIPASMGNLSX

SEQ ID NO: 352 - protein, 144 aa, Zea mays
MAAPKPISRLISHVILDLDGTLLNTDSVVSKVVKPFILKNGKTWDSKKAHKLVGKTPYEAAAVVLEDYGLPYSTEEFLSMITPMFSEQWCNLKPLPGANRLIKHLKTNGVPTAVASNSPRCNIEAKIFFQQGWKEVFLCNCWWR

SEQ ID NO: 353 - protein, 241 aa, Zea mays
  misc_feature (19)..(20): Xaa can be any naturally occurring amino acid
  misc_feature (217)..(217): Xaa can be any naturally occurring amino acid
  misc_feature (237)..(237): Xaa can be any naturally occurring amino acid
  misc_feature (241)..(241): Xaa can be any naturally occurring amino acid
MATSMGCLVLLCLVSSLLXXSAVLGHPWGGLFPQFYDHSCPKAKEIVQSIVAQAVAKETRMAASLVRLHFHDCFVKGCDASVLLDNSSSIVSEKGSNPNRNSLRGFEVIDQIKAALEAACPGTVSCADIVALAARDSTALVGGPYWDVPLGRRDSLGASIQGSNNDIPAPNNTLPTIITKFKRQGLNGGDVAALSGGHTIGMSRCTSFRQRLYNQTXNGMADSTLDVSYPAKLRQGXPRFX

SEQ ID NO: 354 - protein, 540 aa, Zea mays
  misc_feature (1)..(1): Xaa can be any naturally occurring amino acid
  misc_feature (16)..(16): Xaa can be any naturally occurring amino acid
  misc_feature (20)..(20): Xaa can be any naturally occurring amino acid
  misc_feature (39)..(40): Xaa can be any naturally occurring amino acid
  misc_feature (325)..(325): Xaa can be any naturally occurring amino acid
  misc_feature (540)..(540): Xaa can be any naturally occurring amino acid
XHATPASCSLSRIPSXDHEXHDGAHTVHALRPSMAPYPXXLHLQQQVHLRHASKPTNPAPVHHHGHGNPKPDAVAVRRGAPADARGLRALIKALSSSASSTSTAAAVHAHATKIGLDRERTVRNGLIALYLARGERAAAGTLFDAFPGDGPDVVSWTAMVTGHARLGLARDAVALFLAMLELGDGVSVDAVAAAAGFAACAEARDLALAREAHRRVAAAGVALDVVAWNALVDMYAKCGDVAAARRWFRRIPLPRTVVSWNTMLAALARAGEYGEALALFREMQRAGVCPDGGTFVAVLGACAQLGALDTGRWVHAYMRRQLGAXDADAGGVVSNALLNMYAKCGAVDQAMIVFDGMALRDVYTYGSMIAGLATHGRAEEALALFAAMRRTGVRPNGVTLLGVLSACCHAGLVDEGLHHLGAMAEAYGVAPGIEHYGCAIDMLGRAGRLDEAEALAAAMPVPPDALVRGSLLAACRARGNVERAERVMRRVVVAADSGGGEAGDHVLLSNMYASKGRHGRAVRVRKQMRRSKIVKDPGCX

SEQ ID NO: 355 - protein, 490 aa, Zea mays
  misc_feature (80)..(80): Xaa can be any naturally occurring amino acid
  misc_feature (180)..(180): Xaa can be any naturally occurring amino acid
AAPSAATRRKLQRKFRLRGFTLKVDALEEAAAFLDRFPDAEDDALDLLLDELDKERAVQSSILDRDAVRRVVALLVEAEXGAHVASPAATSARSALRVVDAFLVPRFHYDPIKKVFYEHTGRLAVHGEAGDKASLYRDRYQVLLQRLSRDKYFSKPAFDTSITTFLNIEHKITSGFFVEXTVIVAEGELLSNGIFQVNTCGFPPLEDREASVSLLMGFDFFGGGVIPTEETLRLSSLEKKAVNDMFVILSDVWLDNPETMEKLAVVLDGYDSVEVVPSLFVLMGNFCSRPCNLAFNSFEELRFQFGKLGEMIAARSRLKEHSRFLFIPGPDDAGPSKALPRCALPKYLIEELQKHIPNSIFVSNPCRVKFYTQEIVFFRQDLLYRMRRSCLIPPTTEETSDPFEHLVATITHQSHLCPLPLTVQPIIWNYDHCLRLYPTPHTIVLGDKSEQKAFKYTGITCFNPGSFANDSTFAAYRPCTKEVELSALEG

SEQ ID NO: 356 - protein, 79 aa, Zea mays
  misc_feature (56)..(56): Xaa can be any naturally occurring amino acid
  misc_feature (79)..(79): Xaa can be any naturally occurring amino acid
FISEAVNLCDQVPKEGIFENIHTMEDLLKMTEWTEERPLRVVTGFGYLGNKFLREXGFKHVRFLSADGALESYPPVSLX

SEQ ID NO: 357 - protein, 211 aa, Zea mays
LQAVNLKSTEVIEHPYVQIFNEGHQNVLVEMLEIITVICEELKLPIAQTWVPCKYQNLLIHCGGENKSCFDIHESCAQELCMSTSAVMFHIIDAHMWGFRDACVEHHLKKGQGVSGKAFILRRPCFTKDVTRFSKMEYPLVHYARMFGLAGCFSICLQSAYNRNEDYVLEFFLPPDCREDGEQKVLLDSILALLRQYLNRLQVAPSKAQNE

SEQ ID NO: 358 - protein, 82 aa, Zea mays
AFLISSSPRSGKWRDAQANVPSARRLRAQPAFKNLMVRGILQFTPGIAFCYVLHRCENPNIRCPKSSRLLYLIDEIPGLLSF

SEQ ID NO: 359 - protein, 270 aa, Zea mays
  misc_feature (1)..(1): Xaa can be any naturally occurring amino acid
  misc_feature (264)..(264): Xaa can be any naturally occurring amino acid
  misc_feature (270)..(270): Xaa can be any naturally occurring amino acid
XHACRQLELLDIYNNSFTGPLPDQVGNLSTYLIEFRANANKLSGELPSSLSNLSSLVSIYFHDNLLTGAIPESITRLQNLILFDVASNQMSGRLPTQIGKLKSLQQFYTNGNKFYGPIPDSIGNLTSIEYIYLSDNQLNSTVPSSLFQLPKLIYLDLSHNSLTGSLPVDVSGLKQVDFVDLSSNYLFGSIPESFGTLKMLTYLDLSFNSLEGSIPGLFQELESLASLNLSSNSLSGTIPQFLANFTYLTDLNLSFNRLEGKVPXEGGVFX

SEQ ID NO: 360 - protein, 192 aa, Zea mays
  misc_feature (1)..(1): Xaa can be any naturally occurring amino acid
XHASADAWERPASAPPTPSPGPTPSYGRFYSVIGGGSRHILKTDIIHHLDRCGLSLDDVKIEYNKGYAPLAALLRFSSKAMFTTAIRQANQNRLHRIDEISRETWDLKKSFDGKAVLLQGVPRNALADDIERFLCGTNFEPPPFETFLRAGVPEPIRMMLVKFHTKTDAMNAFITKNRSFCLNSQVSMRVLQ

SEQ ID NO: 361 - protein, 925 aa, Zea mays
MRIMIKGGVWKNTEDEILKAAVMKYGKNQWARISSLLVRKSAKQCKARWYEWLDPSIKKTEWTREEDEKLLHLAKLMPTQWRTIAPIVGRTPSQCLERYEKLLDAACAKDENYEANDDPRKLRPGEIDPNPESKPARPDPVDMDEDEKEMLSEARARLANTRGKKAKRKAREKQLEEARRLASLQKRRELKAAGIDTRHRKRKRKGIDYNAEIPFEKRPPSGFYDTVGEDRPPEHVQFPTTIEGLEGKRRADIEAQLRKQDIARNKILQRQDAPAAIMQANKLNDPEAVTKRSKLMLPPPQISDHELEEIAKMGSAGDPALADELGEGSTATRTLLASYSQTPRLGMTPLRTPQRTPAGKGDAIMMEAENLARLRESQTPLLGGDNPELHPSDFSGVTPRKKEIQTPNPMATPLASPGPGITPRISMTPSREGHSFGLTPKATPLRDELNINEVEMQDNTKLELRRQAELRKSLRSGFASIPQPKNEYQIVMPPITEDEKEEAEEKIEEDMSDRLARERAEEQARHEALLRKRSKVLQRSLPRPPAVSVEIIRQSLIRSGESRSRSTFMPPTSLEQADELINEELLRLLEHDNAKYPLDEKTQKEKKKGSKRQQNGGPLVPEIDDFDEDELKEASSMVEEEIQYLRVAMGHENESFEDFVKAHDACQDDLMFFPTSNSYGLASVAGNADKISALQNEFETVKKRMDDEAKKASRLEQKIKLLTQGYQIRAGKLWSQVQDTFKQMDTAATELECFQELQKQEHLAASYRIQNLSEEVSKQKALERTLQSRYGELVSGFQRIQEQVEEHKRQLKVQEAVEAESHAQEEEAAASNHAAAEEEDERKEDDERKEEDGSKSLSSEEKPQQTSTATDEEPAGSKGTTEDQMDVDSGNGEGGVVGPVPPAPDTEGGNDEVSVQEISEAQPLP

SEQ ID NO: 362 - protein, 55 aa, Zea mays
LQRFAYGQCSPATTSRARLCARGLVFSLNVFATARGHRSENTCLCQPVVQTIHAS

SEQ ID NO: 363 - protein, 912 aa, Zea mays
MDLDPAYPTSACADAWPFDSLTTSLLFSPQLTPIPANSSSSWLTPHSPLWLFEDRHLLPLDAPAVFEEVQRPRSGNSHTSSKPAEQISHRWQFHLSLDEDGTDNSSLFKEKLTHALRYFKESTDQHLLVQVWAPVKNGDRYVLTTSGQPFVLDHQSIGLLQYRAVSMTYMFSVDAENVGDLGLPGRVYKQKVPEWTPNVQYYSSGEYQRLNHAISYNVHGTVALPVFDPSAHSCIAVVELIMTSKKINYACEVDKVCKALEAVNLKSTEIHDHPNVQICNEGRQAALVEILEILTVVCEEHKLPLAQTWVPCKYRSVLAHGGGLKKSCLSFDGSCMGEVCMSTSDVAFHVIDAHMWGFRDACVEHHLQRGQGVSGKAFISHKPCFSKDIRKFCKLAYPLVHYARMFGLSGCFAICLQSSYTGNDDYILEFFLPLDCIDEDDQNALLESILTLMKRCLRSLKLVDDNDLSGVSLHLSNVLKLENEESKTDAQFDGSLRESPEDDRHGGSHKFDNENQKVLDITEGQLLTDDYSQDNGTSVGRPNGSGASDSSLLHKTNKPPERRRGKAEKTISLEVLQQYFSGSLKNAAKSLGVCPTTMKRICRQHGISRWPSRKINKVNRSLSKLKQVIESVQGSDAAFNLTSITGPLPIPVGPSPESLNVEKLTQSKVAELSNLAVGVDRDSLQKSLENDDLDIVMAQQGFIDNNNDVQLEADKASHSRSSSGEGSINSRTSEGSCQGSPANQTFVCKPIASMFAEPQLNQEEFNKEPFQEPQLPLSRMLIEDSGSSKDLKNLFTSTSDQPFLAPPNNLVSMKHSGTVTIKASFKEDIVRFRFPCSGGVIVLKEEVAKRLRMDVGTFDIKYLDDDHEWVKLACNADLEECMEISRLSGSHVIRLLVSDIAAHFGSSCGSSG

SEQ ID NO: 364 - protein, 378 aa, Zea mays
  misc_feature (90)..(90): Xaa can be any naturally occurring amino acid
  misc_feature (101)..(101): Xaa can be any naturally occurring amino acid
  misc_feature (109)..(110): Xaa can be any naturally occurring amino acid
  misc_feature (146)..(146): Xaa can be any naturally occurring amino acid
  misc_feature (244)..(244): Xaa can be any naturally occurring amino acid
  misc_feature (259)..(259): Xaa can be any naturally occurring amino acid
  misc_feature (264)..(264): Xaa can be any naturally occurring amino acid
  misc_feature (279)..(279): Xaa can be any naturally occurring amino acid
  misc_feature (293)..(293): Xaa can be any naturally occurring amino acid
  misc_feature (299)..(299): Xaa can be any naturally occurring amino acid
  misc_feature (311)..(311): Xaa can be any naturally occurring amino acid
  misc_feature (333)..(333): Xaa can be any naturally occurring amino acid
MANPTQAQAASRVFLAHSPHHYPDLTCSQAPSACLYKSPGQSDSLTHARLLQETTAEPNRTSARGRREREREAGSKTMEGKEEDVRLGAXNKFSERQPIGXTAAQGRRXXDKDYKEPPPAPLFEPGELKSWSFYRAGIAEFVATFXLFLYITILTVMGVSKSTSKCATVGIQGIAWAFGGMIFALVYCTAGISGGHINPAVTFGAVLSRKLSLTRALFYIIMQCLGAICGAGVVKGFQQGLYMXATGGGANVVAPGYTXKGDGXLAPEIVGTFILVYTXVFSATDAKRNARGXPHVPIXLAPLPLGSAVFXLVHLATIPITGTGINPARSLGXAAIIYNRDHAWNDHWIFWVGPFIGAALAAIYHQVIIRAIPFKSRS

SEQ ID NO: 365 - protein, 43 aa, Zea mays
GNTGMLVCSMLQGRVSRLLWRLCPIPAASGVWLELQHSMRSPC

SEQ ID NO: 366 - protein, 275 aa, Zea mays
  misc_feature (1)..(1): Xaa can be any naturally occurring amino acid
  misc_feature (42)..(42): Xaa can be any naturally occurring amino acid
  misc_feature (224)..(225): Xaa can be any naturally occurring amino acid
  misc_feature (229)..(229): Xaa can be any naturally occurring amino acid
  misc_feature (233)..(233): Xaa can be any naturally occurring amino acid
  misc_feature (249)..(249): Xaa can be any naturally occurring amino acid
  misc_feature (254)..(254): Xaa can be any naturally occurring amino acid
  misc_feature (257)..(258): Xaa can be any naturally occurring amino acid
  misc_feature (264)..(264): Xaa can be any naturally occurring amino acid
  misc_feature (269)..(269): Xaa can be any naturally occurring amino acid
  misc_feature (274)..(274): Xaa can be any naturally occurring amino acid
XSILGALVLILREKRFSSQKLGSFMELAFGGRYVILLMAIFXIYCGLIYNEFFSVPFHIFGKSAYECRDKSCSDAHTFGLIKVREPYPFGVDPSWRGSRSELPFLNSLKMKMSILMGVAQMNLGIVLSYFDARYHGNALDIRYQFIPQMIFLNSLFGYLALLILIKWCTGSQADLYHVMIYMFLDPAGDLGENQLFWGQKELQILLLLLALIAVPWLLPRPFIXXKTSXERFXGHTYRSRTSEMDPDSXPDSPXHVXXFQFSEXFVHQXIHPLXV

SEQ ID NO: 367 - protein, 342 aa, Zea mays
  misc_feature (1)..(1): Xaa can be any naturally occurring amino acid
  misc_feature (10)..(10): Xaa can be any naturally occurring amino acid
  misc_feature (258)..(258): Xaa can be any naturally occurring amino acid
  misc_feature (302)..(302): Xaa can be any naturally occurring amino acid
XRRATSFITXDVWYGIYAGTNPETFVRADGAFIPFAHDFDISTVTTTVRGVGDIGDVKVIDLQSPLNSLIGRQVCKIGRSSGHTTGTVVAYALEYNDEKGISFFTDLLVVGENRQTFDLEGDSGSLIILTGQDNEKPRPIGIIWGGTANRGRLKLRCDHGPQNWTSGVDLGRLLDRLELDLIITSESLKGSAAVQQQRRALVAAANSAAGESSTAAAPVLEEKVEEIFEPLGIKIEQLRRHDVSASEAEEAAGINVEXAPVHLKLCGQVPCGDDQGAPRQIANLNNPSEEELAMLLHLGDQXPKRLRRQNPTSTGNGEALISVSLHRRVASSPKKVTWSSAN

SEQ ID NO: 368 - protein, 283 aa, Zea mays
  misc_feature (20)..(20): Xaa can be any naturally occurring amino acid
  misc_feature (57)..(57): Xaa can be any naturally occurring amino acid
  misc_feature (282)..(282): Xaa can be any naturally occurring amino acid
MALSSLPAAITGAAPTSAAXCRGRDDDDCADVCDGERQRQAARHEEAEAEACSGSRXSPMDKYWTPVDDKEAAEAVEDGGEDGRRPLQFRTYKVKGILLHPYRLLTLLRLIAIILFFIWRIRHPHADGMWLWWISIVGDFWFGVTWLLNQVAKLNPTKRVPDLSLLRQQFDLPDGNSNLPRLDVFINTVDPINEPMIYTMNSILSILAVDYPIDRTATYLSDDGGSIIHYEGLLETANFATLWVPFCRKHSIEPRAPESYFAVKSRPYTGNVPDEFADDHRXH

SEQ ID NO: 369 - protein, 53 aa, Zea mays
AISRRATLYKMIRDYDQAANDVRKLISLLEKKVNVSGVSPKAFNKHNDLKQAH

SEQ ID NO: 370 - protein, 122 aa, Zea mays
  misc_feature (122)..(122): Xaa can be any naturally occurring amino acid
VLIFRTMLSREKANKPTEDSSLLLTSTNSQPTLSLLSQLKQQNKPDKLGPTLENESNPDTILKAWGGNQPSHKSISSTERHDAESLQSVLQNFSLAQNEKMESEKNKYSDSVLVSSTFYSAX

SEQ ID NO: 371 - protein, 764 aa, Zea mays
MKISALLTSAGINIGLCVLFLSLYSVLRKQPANVRVYFGRRIAEEHDRLRGAFILERFVPSTGWIVKALQCTEEEILAAAGLDAVVFNRILVFSIRIFSLAAVLCVFGILPLNYFGQDIHHVRIPSESLDIFTIGNVEVKSRWLWVHCVTLYIISAVACILLYIEYKHIARLKLLHLTSATPKPNHFTVLVRGIPKADKESCSDVVDNFFTKYHSSSYLFHQVVYKVGKVQKIMTGAKKAYKKFKHLTVDQGCRTVTYRCCLCGASSNSFKLLNTECEQNKGKADNKSILDLDDEECTTAFVFFKTRYAALIASEILQTSNPMKWVANLAPEPEDVYWSNLWLPYKQLWARRIATLLGSIFFMFIFLIPVTFIQGLSQLEQLQQRLPFLRGILKKKYYMTQLVTGYLPSVILQIFLYIVAPIMMLFSTLEGPTSHSERKRSACCKVLYFTVWNIFFANVLSGTVISQLNVLSSPKDIPVQLAKAVPGQATFFITYVLTSGWASLSSEVMQLFGLIWNFIIKYVLRMREDTEFVPSFPYHTEVPKVLLFGLLGFTFSVLAPLILPFLLVYFCLGYVVYRNQLLNVYRTRYDTGGLYWPIAYNTVIFSLVLTQIICLGVFGLKESPVAAGFTVPLIILTLLFNQYCRNRLLPLFKTFPAQDLIDMDREDERSGRMDEIHHGLHSAYCQFADTVDQGSSSGQSSVKETCEDPKKHLAHPTLKGLPVNRLRHAVRSVGYINVQRHTCIYDRSLRREKGYVEVYGRTSS

SEQ ID NO: 372 - protein, 108 aa, Zea mays
PCPRRRTCPSATARAAPAPTRAGSRRSRRLLAPEWWSSLQTNTHNRRRRPRPPPPHLEVVAQRCRIIRTRRASRRCCASCMTSSRSTRRRWSRPAAALPWSGMVAEVS

SEQ ID NO: 373 - protein, 333 aa, Zea mays
  misc_feature (220)..(220): Xaa can be any naturally occurring amino acid
  misc_feature (229)..(229): Xaa can be any naturally occurring amino acid
  misc_feature (245)..(245): Xaa can be any naturally occurring amino acid
  misc_feature (269)..(270): Xaa can be any naturally occurring amino acid
MRPVFCGNLDYDVRISEVERLFGKYGRVERVDLKTGFAFIYMEDERDAEDAISRLDGIDFGRKGRRIKVEWTKEDRTADRRGNSRRSPTNAKPTKTLFVINFDPINTRIRDLERHFDKYGRVANVRIKKNFAFIQFEAQEDATRALEGANGSHFMDRVISVEYALRDDDEKGERATNGYSPDRRGRERSPGARRSPSPYGRGRERGSPDYGRGKERGSPXLRQGRPQPXWQGRPPSRRWRRRQRXSPRGGGRRRSPDYYDRERREASPXXYDRPPSCSRLELGGTRETRKAPHACVVEFKHQSLPRQMKLELVMLASRKLVYLCALARADFAS

SEQ ID NO: 374 - protein, 196 aa, Zea mays
  misc_feature (29)..(29): Xaa can be any naturally occurring amino acid
  misc_feature (91)..(91): Xaa can be any naturally occurring amino acid
  misc_feature (98)..(98): Xaa can be any naturally occurring amino acid
  misc_feature (111)..(111): Xaa can be any naturally occurring amino acid
  misc_feature (158)..(159): Xaa can be any naturally occurring amino acid
  misc_feature (193)..(193): Xaa can be any naturally occurring amino acid
  misc_feature (196)..(196): Xaa can be any naturally occurring amino acid
LGSFIGTVIGNIKLSIGNIHIRYEDVERXLVSCSNPGHPFAAGLVLSKLSAVTVDDLGKETFATGGDLDRVKKVPLHTSSIFHIWCAYLFXFDLFYFXSICVTSLTWHFAXSVELESLAVYFDSDSSPWIVDKPWEDLLPSEWSQVFEFQEQDGSRSXXSKKHAYILQPVSGKAKYTKIQLTEAKKTGQALQXYCX

SEQ ID NO: 375 - protein, 214 aa, Zea mays
  misc_feature (1)..(1): Xaa can be any naturally occurring amino acid
  misc_feature (3)..(4): Xaa can be any naturally occurring amino acid
  misc_feature (155)..(156): Xaa can be any naturally occurring amino acid
  misc_feature (214)..(214): Xaa can be any naturally occurring amino acid
XCXXPAGAGTVLEAPPPPHHGLNGCVLTLIALSCRRLGIATALVERAEEWWRERGAAHATMATTTSNAASLALFTGRFGYTPFRRPEFLGRPVHAHRLPIPSAHRVFQLPPPLAAAAYARLSPPQATEFLPADMPALLAHKLTLGTFVAVESGPXXEPDQSAPPSFAVLSVWDSTRSMRLRVRGARALLRASLAALMALDRGAPWMRVPCVPDX

SEQ ID NO: 376 - protein, 285 aa, Zea mays
  misc_feature (1)..(1): Xaa can be any naturally occurring amino acid
  misc_feature (22)..(22): Xaa can be any naturally occurring amino acid
  misc_feature (24)..(24): Xaa can be any naturally occurring amino acid
  misc_feature (283)..(283): Xaa can be any naturally occurring amino acid
XAVQYNKLATQVITNHLQHCYXVXGCDASVLLDNSSSIVSEKGSNPNRNSLRGFEVIDQIKAALEAACPGTVSCADIVALAARDSTALVGGPYWDVPLGRRDSLGASIQGSNNDIPAPNNTLPTIITKFKRQGLNVVDVVALSGGHTIGMSRCTSFRQRLYNQTGNGMADSTLDVSYAAQLRQGCPRSGGDNNLFPLDFITPAKFDNFYYKNLLAGKGLLSSDEILLTKSAETAALVKAYAADVNLFFQHFAQSMVNMGNISPLTGSQGEIRKNCRRLNNDHXGH

SEQ ID NO: 377 - protein, 117 aa, Zea mays
CSIFAGFSTMDRPTRLVHLAIAGFSLRIACLAVVAVFVLAAYLAFAPIDPHIAAAACVLPLLAALLRRLFQKHASPKLRNALQFARGFFQNHISPIVGCIKAKLPQSLSAIITDLVP

SEQ ID NO: 378 - protein, 326 aa, Zea mays
VDLPTLTDKDKEDILKWGVPNKIDMIALSFVRKGSDLVEVRKVLGEHAKSIMLMSKVENQEGVANFDDILANSDAFMVARGDLGMEIPIEKIFFAQKVMIFKCNIQGKPVVTATQMLESMIKSPRPTRAEATDVANAVLDGTDCVMLSGETAAGAYPELAVQTMAKICLQAESCVDHAAIFKSIMASAPIPMSPLESLASSAVRTANSARAALILVLTRGGTTARLVAKYRPSMPILSVVVPELKTDSFDWACSDEGPARHSLIVRGVIPMLSAATAKAFDNEATDEAIGFAIENAKTMGLCNTGQSVVALHRIGISSVIKLLTVK

SEQ ID NO: 379 - protein, 77 aa, Zea mays
LASGGMQCNARPPQVGTRKGRILPLITSKPSPSHRLFLQEPSPETVAAENRHGSKRRVCAAVGKDQSYGEKGGSETE

SEQ ID NO: 380 - protein, 239 aa, Zea mays
MMEGGSRADGRNPNQLRPFTCTGNPLHRAHGSARWAQGDTVVLAAVYGPKSGTRKGENPEKASIEVVWKPKTGQIGRQEREYEMTLKRTLQSICLLTVHPNTTSVVLQVVGDDGSLMSCAINASCAALAFAGIPMKHLAVAISCGVMDNGVVILDTSRAEEQQARSFAHLVFPNSRKSVESKDTTQRDEESERGLITCITHGAMSEDDYFNCIERGVMASSRISDFMRKTLQKEASRDA

SEQ ID NO: 381 - protein, 54 aa, Zea mays
  misc_feature (54)..(54): Xaa can be any naturally occurring amino acid
LQYEESLTGGSFDEGNMVKNIEACDWLTSAIKNLEASNIDPIYVKLRAVGSLSX

SEQ ID NO: 382 - protein, 368 aa, Zea mays
  misc_feature (1)..(1): Xaa can be any naturally occurring amino acid
  misc_feature (9)..(9): Xaa can be any naturally occurring amino acid
  misc_feature (48)..(48): Xaa can be any naturally occurring amino acid
  misc_feature (56)..(56): Xaa can be any naturally occurring amino acid
  misc_feature (86)..(87): Xaa can be any naturally occurring amino acid
XLSSFFSSXTTSGRGARARRAAKDSTVAFSAQILEIPIPDRPPISNFXRLAPPRPXRPTHASSPSAPLLHNHGGRHRVARQRGQGXXSHANQEKRWVLSDFEVGKPLGRGKFGHVYLAREKRSSEIVALKVLFKSQLKQSQVEHQLRREVEIQSHLRHPNILRLYGYFYDQTRVYLILEYAAKGELYKELTRCKHFSERRTATYVASLARALIYLHGKHVIHRDIKPENLLVGVQGEIKIADFGWSVHTFNRRRTMCGTLDYLPPEMVEKAEHDYHVDIWSLGVLCYEFLYGVPPFEAKEHSETYRRIVKVDLKFPLKPFVSPAAKDLISQMLVKSSAQRLPLHKVLEHPWIVQNADPSGVYREGRSV

SEQ ID NO: 383 - protein, 194 aa, Zea mays
  misc_feature (38)..(38): Xaa can be any naturally occurring amino acid
  misc_feature (192)..(192): Xaa can be any naturally occurring amino acid
YNSYLELKRKTLKALCRAFPASIFSMRWQLYLDSWPMXIVLTNTCCSHPLYRESELIEENCAGVRNAAQRKLFDELGIVADELPVDQFIPLGRMLYKAPSDGKWGEHELDYLLFMVRDVKLDPNPEEVADVKYMNRHQLKELLRKADAGEDGVKLSPWFRLVVDNFLMGWWDHVEQGTLQGAADMKTIHKLXIF

SEQ ID NO: 384 - protein, 43 aa, Zea mays
VEPIVCNRKVSGSSTASAYYADKAWRLKIPFPRPRTVREAYGI

SEQ ID NO: 385 - protein, 119 aa, Zea mays
  misc_feature (119)..(119): Xaa can be any naturally occurring amino acid
AAILVARIFSRVVLFFLPNLRRVCPQAGNHVKDDVWHALIVLVSNASELQGYSVRSLYKALQASSEQESLVRVAVWCIGEYGEMLVNNLSMLDMEEPITVTEYDAVDAVEAALQRYSAX

SEQ ID NO: 386 - protein, 335 aa, Zea mays
  misc_feature (1)..(1): Xaa can be any naturally occurring amino acid
  misc_feature (17)..(17): Xaa can be any naturally occurring amino acid
XKEVTNSPQPVKESCRXGGQTKPRDVITPRVKPEINTHSAPILAGNLPDPSERSWQTKPSSAKLSYKLPMPVDDKDPRSAGAQRPHHSQQLESKPRVSANPWHSSPLTKDFRPGGHVKTPPSAEGASAFSQPVSDFKKMKRQFYSGPMASGPGLSMPSSLNDRRSSAAQAQHLVMPGNLQGLFWQPSSASPKVPPKMLGRHPTKSPRISELHELPRPPPASVESLRPSGLVGYSGPLVSKRQTQIPAATARVSPTASRTPSPLPPPPATLTRSYSIPSNSQRIPIVTADRLLEARNSRDGSDIYSPPLTPLSLTDLSQQQGTKTTAGGTRMKGAL

SEQ ID NO: 387 - protein, 191 aa, Zea mays
  misc_feature (191)..(191): Xaa can be any naturally occurring amino acid
MQTTGPASPDKPPVVDPEADDKVEEGARAKEDDAAKVSGEDEDEEEQEGRRGRRQRRRRGGAAGDSSVAMVKRELLARCLTCPLCDRLLRKATTISECLHTFCRNCIYNKINDEDLDHCPVCKIDLGCTPVDKLRADHNIQDVRSKVFPFKRKKVNAEEAESPIMLPVKVKERSISSLVVNTPRVTQQLHX

SEQ ID NO: 388 - protein, 375 aa, Zea mays
MAEQQQPQQQPQEMDVDRTGGLELPPGFRFHPSDFEIVNDYLTNKVHDRDYSCIAIADADLNKTEPWDLPKVAKMGEKEWYFFYQKDRKYPTGLRANRATEAGYWKATGKDKEVYDPLAAEGLLLVGMKKTLVFYKGRAPRGDKTNWVMHEYRLEGSGRLPASPSACKDEWVVCRVFNKTTGIKKTAAPAYVFLQVAMAGAEMDQNQNNIPAIPIPMPLQLPLPVPMQMQFPILPDFAMDPVAPYYPNPNAGAGMMPPMALAGMGGAGGLQINGALFGNPVPAPLPMNFYHHQMGMGAAAGQVDMGAAAGQMDMGAAGAGAGGFDVAAPESRPSSMVSQKDEQANAAEISSMMSVTGPGSATTTIEMDGIWKYKY

SEQ ID NO: 389 - protein, 800 aa, Zea mays
  misc_feature (112)..(112): Xaa can be any naturally occurring amino acid
  misc_feature (128)..(128): Xaa can be any naturally occurring amino acid
  misc_feature (425)..(425): Xaa can be any naturally occurring amino acid
  misc_feature (457)..(457): Xaa can be any naturally occurring amino acid
  misc_feature (552)..(553): Xaa can be any naturally occurring amino acid
  misc_feature (592)..(592): Xaa can be any naturally occurring amino acid
MVAAANAANRAGDAKSSGAGNTSPSASAHTLATNSGAAAMNLSFANMQPADAQFLAILQNGYPFQVAAHPGGPPYRGTPGPAVPFFNGHVYSSPMLHPSQQQGAQSQSHQKXPNAKLAQFITEASATXQSQGLLGYAPNTNAAAAASNSQNYSSGNQRPVLLPGLVHRQESDKTGQDCPSSDDKPSHSQKSGYEHNFAVPVHLPNFAMMPAAQPAGEKKLSDHQHHQQQQQPQVSRGQVDLASSQPFVMPFGSIGPPGSTPSGLDFSALAQNHAVFQSHQDAARHGYPQLNFAAAQPVQSTQQKPQHQMTGETKTVAGDSSSTPIAGDSERKKSTSHKYSSDSQQHSLSFTRTESKNYVPPFLTGNTNETSSRTLSLIGTESSNAFMGSKPTNSNTPASTAAAASASISQQQQQHLQMQAQQKHXAASAANSASPSESAQICCTKYTEQCRWVPRPXINMANFQNMMYPSSAAQGRVQSPQLKASSGRGTPSSTATTTPAATPPNLIMMKNSSLHQQQAKVPMQALYTPGHQSQTSLSSSKVGPSLTNLSTXXGGDLSRSSNAPVASGSPSNSVSKSTGGSPPATGNAKGVXSSLSNCHHHSSTAKNSASTSGSRTTPTNHFSMAMPSILGQQPNASPGSNPGSKQHSHTQPASMKQQPFPQGHFFISNTYAPPAPGAGGAAALGLYQKRPGDKTQQQQQQQASHQQSAMSGSSATPSMSFGSVSASSAVTLADPGKLLLAAAGGNNVKALHPSSGGFMHLAAQSAGGMAHTHVSAGQLTVRTMPTPLKPSSDQKPAAGK

SEQ ID NO: 390 - protein, 183 aa, Zea mays
  misc_feature (160)..(161): Xaa can be any naturally occurring amino acid
LQYSSIAVMFLGVVFAVAELRGFSFKSRHARIGAVALTFASMQLVNAYLRPHKTENGETPPGNRVVWEYLHVLTGRSAALAGTLALFTGLQHLGHRYGSKTIKGLTCGLILWVISVTLLTAYFEYMAIKRRTAGVDGLSGNWVLGNTEEDDTVELLQSNXXVVSKMESNLSPEPMEVQLEPLK

SEQ ID NO: 391 - protein, 472 aa, Zea mays
  misc_feature (451)..(451): Xaa can be any naturally occurring amino acid
MLNCSRKMGRSASVLQVLLVSATIAQWASGVWGMYCEDLTASVERPHRASVTDFGAVGDGATLNTKAFQNALFHLDSFAKKGGAQLFVPAGRWLTGSFSLISHLTLSLDKDAVILGSPDSSDWPVIDALPSYGRGRELPGKRHQSLIFGSNLTDVIITGANGTVYGQGAVWWDWFHNHTLNYTRPPLVELMYSTRVVISNLTFINSPFWNIHPVYCSQVLVQHLTILAPISSPNTDGIDPDSSTNVCIEDCYVRNGDDIVVIKSGWDEYGISFAHPSSNISIRNITGQTRNSAGLAFGSEMSGGISDVRAEGVRIVNSVHGIRIKTAPGRGGYVKNVYVADVSFDNVSIAIRITGNYGEHPDDGYDRNALPTISNITIKDVVGVKIGVAGMLQGIPGDSFSGICLSNVSLSVRSTDPWNCSLVEGYSSSVSPEVCEQLRATPGPGQMCYGXVTIRQLRHNRSRRRSQVLAGW

SEQ ID NO: 392 - protein, 231 aa, Zea mays
MPAAMAAAAAQRLLAASTKIIGVGRNYIAHAKELGNPVPKEPVLFLKPTSSFLHAGVATAAVEIPEPLESLHHEVELAVVISRRGRDVPEASAMDFVGGYALALDMTARDLQSVAKSAGLPWTLAKGQDTFTPISAVVPKSAVTNPDDLELWLKVDDELRQKGPTSDMLFKIPFLISYISSIMTLMEGDVILTGTPEGVGPVRVGQKITAGITDLIDVEFDVQRRNRSFST

SEQ ID NO: 393 - protein, 337 aa, Zea mays
MHTAATKPLLVFVFVFFTSMAVVSHASSLRFQYIDRRHNFTAKQASTSSSSSPSSAHGSRDRRPSFALVRRDAVTGSTYPSRRHAVLDLVARDNARAEYLASRLSPAAYQPTGFSGSESKVVSGLDEGSGEYFVRVGIGSPPTEQYLVVDSGSDVIWVQCKPCLECYAQADPLFDPATSATFSAVPCGSAVCRTLRTSGCGDSGGCDYEVSYGDGSYTKGALALETLTLGGTAVEGVAIGCGHRNRGLFVGAAGLLGLGWGPMSLVGQLGGAAGGAFSYCLASRGVVGDAGSLVLGRSEAVPEGAVWVPLVRNPQAPSFYYVGLSGIGVGDERLPLQ

SEQ ID NO: 394 - protein, 592 aa, Zea mays
  misc_feature (562)..(562): Xaa can be any naturally occurring amino acid
MATESPGAETPQAQLWKTTTMGWRRWIGRPSCLAHHSDEAALFRAGWVAGQRPRDATRVWARSLRWKLLGWAVSVRGPLVWPRFVVLYYWAVLLKRHTRRRLTKPSPAFPVRRPPLMDAGDASTALALTAAEPSPPSPNRRGKRPTNPPKRFVHTPIPPSILSDPTLAAAATSLLPANYNFELHKTAHRIRSAAARRVALQLPEGLLLFALPLSHLLAPYLGPAHVLVLADATYGACCLADRPARALAADLLVHYGHSCLVPVTASLLPVLYVFVEIRVDAARLAAAVRAAFPDPAAAPRLAIAGTVQFIAAVHAAREMLTVEGYHVVVPQAKPLSAGEILGCTAPTLKKSEEVGAVVFVADGRFHLEAFMIANPGVKAYRFDPFLGVLVLEEYDHVGMKQARKAAVLAARKAKSWGVVLGTLGRQGSTKVLDRVVEHLEEKELEHTVVLMSELSPARMELFGDSIDAWVQIACPRLSIDWGEGFKKPVLTTFEFDVALGYVPGWWEKGSRGCGSECGVGCCSGSGTRGNCNCSDGDYGGDYPMDYYSQDGGDWNSCYMKKXSHLLARGNCGFGLATKFKPRRSVGIRILVS

SEQ ID NO: 395 - protein, 211 aa, Zea mays
LQLENVENDDLIAYGLIPEFIGRLPITVGLTNLSEEQLVQVLMEPKNAIGKQYKKLFKMNDVKLHFTDNALRMIAKKALAKEAGARGLRSIMEGILTEAMFEIPDGRHGKEKVIAVLVDEESVGPLHSRGCRAKIFRDDGALELYVYQNNIKLPGLDTEQPQTQTHFPALPSSRIIGNKALDLPDKFLVFHRCMNGLHGYYARSTILHNKI

SEQ ID NO: 396 - protein, 544 aa, Zea mays
  misc_feature (112)..(112): Xaa can be any naturally occurring amino acid
  misc_feature (133)..(133): Xaa can be any naturally occurring amino acid
  misc_feature (457)..(458): Xaa can be any naturally occurring amino acid
MSSLNKVVSNSGDACSVLASKVTSLNPNAAEFVPSFVKPSFGNGTVLDKSDFRGSSGKTILDRPEPSKSNNSDDEAHQFWHKQLPDDIIPDFTSFEKVEQGPELSLAGLSLXMHPPFMGQLPVASQENITNYXSPVTKGLELELEHTNMLYEDKSNWEQNYIGDLHIANGNQDLHYDSESGVSFSDSFASESPSDGLFAPLEYLASQFPGFSAESLAELYYANGCDFNHTIEILTQLEVNVSHHFNQNVRLPPVRQEPYTSMRFFCGAHQACHGLVAQHRYHAVSEDQNGFNQGNVDVLGMFNGRSSSAMPTGAGDFVSAVRKLASQNSGQWKFKKGPEYGNGISALSVPKQYSSSTKQSSGNKFQSISSGRVAPWLETGDAVGNMYSESRGEARDFARVRNTCFEQARQAYLVGNKALAKELSMKGQAYNVQMKAAHEKAREAIYRQRNPVSSQRXXGGDHLIDLHGLHVNEAIHILKGELTALKSAARAAGERMQVMVCVGTGHHTKGSRTARLPIAVEQFLLDEGLQYTQPQAGLLRVMVY

SEQ ID NO: 397 - protein, 587 aa, Zea mays
MGGAAMYELVRVGHDNLIGEIIRLEGDSATIQVYEETAGLMVNDPVLRTRKPLSVELGPGILGNIFDGIQRPLKTIAIKSGDVYIPRGVSVPALDKDVLWEFQPTKLGVGDVITGGDLYATVFENTLMQHHVALPPGSMGKISYIAPAGQYNLQDTVLELEFQGIKKKFTMLQTWPVRSPRPVASKLAADTPLLTGQRVLDALFPSVLGGTCAIPGAFGCGKTVISQALSKYSNSEAVVYVGCGERGNEMAEVLMDFPQLTMTLPDGREESVMKRTTLVANTSNMPVAAREASIYTGITIAEYFRDMGYNVSMMADSTSRWAEALREISGRLAEMPADSGYPAYLAARLASFYERAGKVKCLGSPDRNGSVTIVGAVSPPGGDFSDPVTSATLSIVQVFWGLDKKLAQRKHFPSVNWLISYSKYSKALESFYEKFDPDFIDIRTKAREVLQREDDLNEIVQLVGKDALAESDKITLETAKLLREDYLAQNAFTPYDKFCPFYKSVWMMRNIIHFNTLANQAVERAAGTDGHKITYSVIKHRLGDLFYRLVSQKFEDPAEGEEALVGKFKKLYDDLTTGFRNLEDEAR

SEQ ID NO: 398 - protein, 245 aa, Zea mays
  misc_feature (21)..(21): Xaa can be any naturally occurring amino acid
LQCSLFILAFYGHDYVYSKNXSIRSVIHHNKQKKLYLMTDYIYIHINLQHYQQESSKLRQAIDSLQNANSRTIVGDSIHTMGLRELKQMEGKLEKAINKIRARKNELLYAEVEYMQRREMDLQTDNMYLRSKIAENNETGQPAMNMIGVPSTSEYDHMAPFVDSRNFLQVNMQQQQPQHYSHQLQPTTLQLGNLQPEALKMESAFTLVGHIQTKQERTMIRDPSRQTLQDCIRKNVIPAITTKGT

SEQ ID NO: 399 - protein, 276 aa, Zea mays
  misc_feature (1)..(1): Xaa can be any naturally occurring amino acid
  misc_feature (3)..(4): Xaa can be any naturally occurring amino acid
  misc_feature (9)..(9): Xaa can be any naturally occurring amino acid
  misc_feature (22)..(22): Xaa can be any naturally occurring amino acid
  misc_feature (276)..(276): Xaa can be any naturally occurring amino acid
XCXXHEVCXSSIPKQRARHRRXYCSETCKKVSARLSDMVGVTNHTEDGFSWALLKIQKDEAVSSQDTAAVLECNVKLAVALGVLNECFNPAKDRRTKIDMLHQAVYSLGSEFKRVSYEGFYTMVLDKDGETIAAALLRIHGTKVAEMPFAATLPAYRKQGMMRRLVNAVEQVLASVQVDKLVIPAIAALVDTWTRSFSFRPLLDPESREEIRRRSLVVIAGTTLLHKPVAAARPPSPHRHAEAAAPKNAGRKYTQQAPPLTDDERAFLDTAPLACX

SEQ ID NO: 400 - protein, 529 aa, Zea mays
  misc_feature (250)..(250): Xaa can be any naturally occurring amino acid
  misc_feature (529)..(529): Xaa can be any naturally occurring amino acid
RDHMCKKAAIGTFEAGRNFVIPKLEKVIDEEKEVSHSSLMDDAEKAILDPLKVKVKLKPDNVDICYPPVFQSGGKFDLKPGASSNDEYLYYDSASIIICAIGSKYSSYCSNVARTYLIDATPTQNKAYETLRKAHEAAIQQVKPGNQMSAVYQAAVAVIERDAPELLPNLTKSAGTGIGLEFRESGLNLNAKNDRRIKKGMVFNVSLGLHNIQAETTSEKTKQFSLLLADTVLVNERGHEVLTAPCSRHXKDVAYSFNEDDDAVAAEVKIKSKDIDVMPTKATLRSDNQEMSKEELRRQHQAELARQKNEETARRLAGVGTGSGDGRGPARASNELVAYKNVNDVPFVRDLVIQVDQKNEAVLLPIYGSMVPFHVSTVKSVTSHQDNRTCTIRIFFNVPGMPFSNDSKFNSQGAIYLKEITFRSKDPRHSSEVVQQIKTLRRQVASRESERAERATLVTQEKLQIGSNRMKMMRLSDVWIRPAFGGRGRKLTGNLEAHFNGFRYSTSRSDERVDIMFGNIKHAFFQPAX

SEQ ID NO: 401 - protein, 386 aa, Zea mays
MPLPLRVPARLLLARHKTTAVQHVAARHLDHAFERLAAAHLPLVAASPLVDALRASPEPLALPNLARRLPLRLHRRGPLHFLRLFPRVFDLRAPLPLSLSLTPAAAGLLAVASSPADAARTLHRLLAMSVTRSLPLRAVFRVWRELALPDDFEDSVVEGHPHLFRLVSNPAEPNTHILHLVADQATEDFTPAVEKARPDRYAFKLQFPPGFRLAKEYRKKVKEWQLLPYTGPYQVVSPSAGGSKRVSKLARRKMEKRAVGIAHEFLSLTVEKMVEVEKFSQFRKWFGIEVNVRDVFLDHPGIFYLSAKGKRHTVFLREMYDRGKLLESNDVSEARAKLVELMLLRRRGLGNANSSANMASGATADARESGDDFVDHEDCLLDVSEK

SEQ ID NO: 402 - protein, 265 aa, Zea mays
  misc_feature (1)..(1): Xaa can be any naturally occurring amino acid
XGLWRGRKDAKGGHCMVAWEKVCRPLHMGGLGISNLTKLCWALRMRWLWLQKTDSSRPWVDLPIQVPSIARSFFSAVLMSEVGNGANTLFWVDKWINGKKVADIAPRLFCTISKRIANKRTVQEAMDNRRWISDIRGALSAGALIDFLHLWEALTDFQLHPDIEDRHIFTIAPDGNYSAKVAYEGLFQGSCSFLHHKRIWKSWMPPKCHFFLWLVAHDKCWTADRLQKRGMNHPARCPLCDQEPESINHLLGSCVFSRVFWYRLL

SEQ ID NO: 403 - protein, 102 aa, Zea mays
  misc_feature (102)..(102): Xaa can be any naturally occurring amino acid
MGGAVMVAIAASIGNLLQGWDNATIAGAVLYIKKEFNLQSEPLIEGLIVAMSLIGATVITTFSGAAADCVGRRPMLVASAVLYFVSGLVMLWAPSVYILLLX

SEQ ID NO: 404 - protein, 743 aa, Zea mays
MESSWLLLLSCLPAVWVLAAAAGRSPGCATRCGEIDVPYPFGLDPQCAIHAGFWLNCTTVDGATKLLDKNSEVTKISVEDGKAWFKNFISRQCYNQSSGDMFENNAWVDYTGEPYVLSAEDNKIIVLGCNSMAYMQSDSYIIGCMSTCDDPLKNGSCSGTAGCCQAELPPGVQFYQGFFNSLHNTTKIWKQTPCNYITVMESAAFSFSSTYLNSTVLYDSDDGRTPVVMEWGITRQTCEEAKANKTAYACVSNHSDCVYSDAAGYRCRCSGGFKGNPYVVDGCADIDECLDSATYPCAGICKNTLGNFTCSCPRGRSMINGVCVKSQRSTWMVPVSVGLVTLVIGVTCAYLVRERRKLHRVKQSYFRRHGGLLLFEELKSQRAAAFTIFSEEELQQATDRFDAQRVLGHGGHGTVYKGVLKSGTATEIAVKRCMTIDEQQKKEFGKEMLILSQVNHRNIVKLLGCCLEVEVPILVYEFVPNGTLFDLIHGDHGQRVSLDTRLRIAYESAEALAYLHSCASPPILHGDVKSTNILLDGDYAAKVSDFGASILAPNDKSQFVTVVQGTCGYLDPEYMQTYELTDKSDVYSFGVVLLELLTGKKAFDLQGSEQDRSLSMRFLYAMKENRLEDILDDQIKNSESIEYLEEIAELARQCLEMSGVNRPTMKEVADKLGRLRKIMKHPWAHEDPEELGLLGEPSTTTNSTATTGNFIIAIGEPSTANSTANTGNFSITKRAAMGLESGR

SEQ ID NO: 405 - protein, 151 aa, Zea mays
  misc_feature (1)..(1): Xaa can be any naturally occurring amino acid
  misc_feature (66)..(66): Xaa can be any naturally occurring amino acid
  misc_feature (71)..(71): Xaa can be any naturally occurring amino acid
  misc_feature (131)..(131): Xaa can be any naturally occurring amino acid
XRSCPSSHNYDSAVDKLDNTQWYVVWNKDMNTRILPEYVVSFKCSKLQLTQELSEATSKLKKPSRXWLATXFPTLLAEIEKIVPDKCDLLQESYSRFKMGRIKKDQFIRFLRNYVGDKVLTTVAKKLRGCXISSARVSLVSPSWWWPTWWL

SEQ ID NO: 406 - protein, 183 aa, Zea mays
MINLFKIKGQKKEEAASAAGKAPVKKQSAGELRLHKDISELNLPKTTSISFPNGKDDLMNFETTIRPDEGYYMGGTFVFTFQVSSSYPHDPPKVKCKTKVYHPNIDLEGNVCLNILREDWKPVLNINTVIYGLNLLFTQPNDEDPLNHEAAVVLRDNPKMFEANVRRAMAGGYVGQHYFQRCA

SEQ ID NO: 407 - protein, 760 aa, Zea mays
  misc_feature (313)..(313): Xaa can be any naturally occurring amino acid
  misc_feature (317)..(318): Xaa can be any naturally occurring amino acid
  misc_feature (320)..(320): Xaa can be any naturally occurring amino acid
MWRLKIGEGGGPWMQTASGFHGRQVWEYDPDAGTDEERSKVEQLRRAFTENRFRRGESQDLLMRMQLTGQKHLHADLPAATKIEEDGDVTEERLRESLRRALGCMAALQAEDGHWPPGDYSGVMYLMPFWIFALHITGTVDAVLSKEHRREICRHIYNHQNEDGGWGFNVIDESAMFSTCLNYTSLRLLDEVQREENDGLAKGRAWILSHGTATAAPHWAKILLSVIGVYDWRGNNPVVPELWLVPRFLPIHPGRFWCFTRIMYMSIAFLYGKKFVGPITPTILALREELYSLPYVHIDWSKARNSCAKVCHXDLHXXSXLLFYSYTCLNMFVEPVLNYWPLNKLRERALNHILEHIHYEDETTQYIGISPVTKALNMICCWVENPNSDALKRHIPRIHDYLWIAEDGMNTKIYDGTHNWELALIIQAMLSADAANEYGPTIQRAMEYLKRAQVTTNPPGNPSYWFRHRSKGSWPLSTIDNGWGSSDTSAEATKALLMISKVYPNLVENSNGDEWMLNAVDCLLSFMNKDGSVSTFECQRTYSWLEILNPLESFRNIVADYPTVECTSSVLQALVLFEEFNSEYRSKEIKENVKKAAIYIENNQNKDGSWYGTWGICFVYGTLYAIKGLVAAGRNYENSICIRKACNFLLSIQLKTGGWAESYHSCERQVYVEGHSTHVVQTAWAMLALIYTGQMERDPTPLHRAAKVLINMQLETGDYAQQEHVGSTNCSVYFNYPNYRILFPVWALGEYHRKVCTKSN

SEQ ID NO: 408 - protein, 144 aa, Zea mays
  misc_feature (40)..(40): Xaa can be any naturally occurring amino acid
YILFSFFFLSSSFVFSIFLSFDPSKAGRGRDDVHSYKYPXHPQQPDKKYHAAGCLFVSSMESTELKVEMVALHEKRVRRCLSKVKGIERVEVEASLQKVVVTGCVNRSKILKALRRVGLRAEPWSNLSLPSFFLKKKKKKAPRA

SEQ ID NO: 409 - protein, 143 aa, Zea mays
MVSGGLAAASEVAVVFLIRPVLAIAFVFTLILLSWYVAWRTVLVHVPLVQEIAGLRPKTSKPKPANRGRFAKFYQNQAEAAQRSKLYLRTTTQAFFSFCSSGCFGADSCGKLTVQHLFNSIQIDCFSAVQSWTPGIAEAVCCS

SEQ ID NO: 410 - protein, 96 aa, Zea mays
  misc_feature (1)..(1): Xaa can be any naturally occurring amino acid
XHHFFSAHDLEKIQETARNLMDEHSKDTIVLVTEKDYDRDPEALKTLDANVWVLSSSLQIMHHSKQGEDEFMRKVNEIITVTWCAKSHAADRATGC

SEQ ID NO: 411 - protein, 158 aa, Zea mays
KLRKGSSRARAQSGMVDGKAAGKNRGGAAALSTAALSRTAWMGEFGWEKRAGFATTRRSPAGRQAWGVGEPAEPSAPPRPHSDPSSESPAAGKETPRRCRHLLPRLPPPHRPFMLLVNPRSLPCWSLLVKGKKKVRGRWVVGGLRKRKIPCEQARVPS

SEQ ID NO: 412 - protein, 175 aa, Zea mays
  misc_feature (1)..(1): Xaa can be any naturally occurring amino acid
XAVEMLDDEVYVGAENSYNLFTVRKNSDAATDDERARLEVVGEYHLGEFVNRFRHGSLVMRLPDSDIGQIPTVIFGTINGVIGIIASLPHDQYIFLEKLQSTLVKYIKGVGNLSHEQWRSFHNDKKTAEARNFLDGDLIESFLDLSRSKMEEVSKAMGVPVEELSKRVEELTRLH

SEQ ID NO: 413 - protein, 439 aa, Zea mays
  misc_feature (13)..(13): Xaa can be any naturally occurring amino acid
  misc_feature (15)..(15): Xaa can be any naturally occurring amino acid
  misc_feature (21)..(21): Xaa can be any naturally occurring amino acid
  misc_feature (33)..(33): Xaa can be any naturally occurring amino acid
  misc_feature (140)..(140): Xaa can be any naturally occurring amino acid
  misc_feature (429)..(429): Xaa can be any naturally occurring amino acid
MRGRGSSGARMSXGXAAEAAXGAVGCGYDLTGXLRLGRAKPGGRLVDLDGAGKWAGTSPSPRELAFPGGAAVAGVPAGVVAGKGERARFRSDVLPFAQMAEEVNRSLSLPGKIPSGAFNAMFDYRGCWHRDAAATRSLVXFDARLVELYSVEAVRASLALRDHVRRDLPPVWDPAALAEFIDKYGTHVIVGVKMGGKDVVCVKQLKGSSLTQSDVQARLKELADDRFSEDSTASSNSSTAGGGRLSQGLNVGPGSAAWQSFRSPVVSHKDSQDMVCIHVRRGGVDSGQGHGKWLSTITGFPDVISMSFVPITSLLTGVRGSGFLNHAVNLYLRYKPPIEELQQFLEFQVPRLWAPEFGQLPLSLQRRKNILPSLQFTLMGPKLHVNTAKVDSCLRPVTGIRLFLEGKKSDQLGVHLQHLSATPSAITVXSSEAASSADD

SEQ ID NO: 414 - protein, 532 aa, Zea mays
  misc_feature (433)..(433): Xaa can be any naturally occurring amino acid
LLSFGVFYQENCDALVTVVRFLSLVRNFHQERKISYTLVLCIYLLLLSSRTGAYIGVNIGTAMSSVPAPTQITTLLRSQNIRHVRLYDADPAMLAALSNTGIRVIVSVPNEQLLAIGNSNATAANWVARNVAAHFPAVNITAIAVGSEVLSAQPSAAPLLMPAMRYLQNALVAAALDRYIKVSTPHSSSIILDSFPPSQAFFNRSLDGVLVPMLRFLQSTGSPLMLNVYPYYDYMRSNGVIPLDYALFRPLPPNKEAVDANTLLHYTNVFDAVVDAAYFAMAYLNVTNVPVMVTETGWPHKGDSSSEPDATSDNADTYNSNLIRHVMNSTGTPKHPGVAVPTYVYELYDEDTRPGSTSEKYWGLFDMNGVPAYTLHLTGSGVLLANDTTNQTYCVAREGADPKMLQAALDWACGPGKVDCSVLMQGQPCYDPXDTVDAHATYAFNAYYHGMGMGSGTCYFSGVAVVTTTDPSHGSCVYAGKNGTSLMNGTSLAPSSNSTEGGSGAHRAFGDVSSLVRIVSTALLFSVVLLLL

SEQ ID NO: 415 - protein, 331 aa, Zea mays
CCLQATNNFNESNKLGEGGFGTVYWGRTWYGVQIAVKRLKAMTAKAEMEFAIEVEILGRVRHKNLLSLRGFYAGGDERLIVYDYMPNHSLLTHLHTQRGAPSSQQHQPLDWARRVAIAIGAAEGLAYLHHEANPHIIHRDIKASNVLLDAEFVPKVADFGFAKLIPDGVSHLTTRVNTLGYLAPEYAMWGKVSESCDVYSFGVLLLELVSARRPLEKLPGGVKREIVQWAAPLVDRRKWERLADPRLAGRFDLLQLRAVVEAAMLCTQSNAESRPAMAEVVEMLRFSGERRTTKEIVPVVAASSEETTDLEDVTGSSEPLDRRSWKLTKLR

SEQ ID NO: 416 - protein, 62 aa, Zea mays
LIGRTQCRRLPALCGVWGRVSLSAKPYPHNMQRLGLEPGTFRLQTVGSTAAPGPPFDGSGNQ

SEQ ID NO: 417 - protein, 181 aa, Zea mays
  misc_feature (143)..(144): Xaa can be any naturally occurring amino acid
FSDRFRDTFLRAILTSVGVATNRRVSMSRCKPVGGESPAADGPMSETPCSVQPGVLPLLGKPYFTCILCKSHVNQPFQVVVPKSLAPFLPGTTVPATVTWHGRSWEMRFTGGRQIQRLEAGWRGFALDNGLKLGDGCVFEVVXXGRAERVVFRVQVLRADIPAEIRERAGGYTPSSPILID

SEQ ID NO: 418 - protein, 372 aa, Zea mays
  misc_feature (264)..(264): Xaa can be any naturally occurring amino acid
GRLPDPATPIPIGRWRGGVTYPGSSSQARRSGCCASPFWRLPYLWQGTSPLASTGEHGECFRCTNASAEDSETTIEIKIKTLDSQTYNLRVNKCVPVPLLKEKIATVTGILSEQQRLICRGRVLKDDELLSAYHVEDGHTLHLVVRHPGQSATFGNAATEANTSNSGRRHGPTVARSVVLEAVNVDPGSSELPAFVAQILQSVLGTINAQSTGTPTSSDTGSLDPSQSSIPNTIRVELDQQQAPLLFQSEPAHESSQPNFAFAXVIPDALTTMSQYINFMRDSFRREGFSLNGQTEGNVENRTAEPESASVLGLHNASLLAENMHSTRQIIVEQAGALLSEVSILTALFNVFISKSCWFQLANLSLSSYRFI

SEQ ID NO: 419 - protein, 100 aa, Zea mays
MAHAAAAALALLVFFCAQARDAAVHVVDAAATLSQGQSLGATDKLVSAGGTFELAFFTPTGGDPSRRYLGVMYAQSTEQTVPWVANREPPVSAASAYSAT

SEQ ID NO: 420 - protein, 559 aa, Zea mays
  misc_feature (473)..(473): Xaa can be any naturally occurring amino acid
  misc_feature (496)..(496): Xaa can be any naturally occurring amino acid
  misc_feature (547)..(547): Xaa can be any naturally occurring amino acid
  misc_feature (549)..(549): Xaa can be any naturally occurring amino acid
TQISSVPCTFRAGRRGQTAVSRGHLLPNAVRTCCPVVRPPSLLLPSNCFLNLPTQPRPCPPRRQPHSSSWGADVLWVVLLSMARKHQHVAIFTTACLPWMTGTAVNPLFRAAYLAKAGDWEVTLVVPWLSKGDQELVYPNKMRFSLPAEQENYVRRWLEERTGLLPKFDIKFYPGKFSTEKRSILPVGDISQTISDDKADIAVLEEPEHLTWYHHGRRWKSKFQKVIGVVHTNYLEYVKREKNGYISAFILKHINSWVTDIYCHKVIRLSAATQDVPRSVICNVHGVNPKFIEIGKLKHQQLCQREQAFFKGAYYIGKMVWSKGYTELLQLLHKHQMELSGLKMELYGSGEDADEVKASAERLSLDIRVYPGRDHGDSIFHDYKVFINPSTTDVVCTTTAEALAMGKIVICANHPSNVFFKRFPNCHMYNTDEEFVRLTMKALAEEPIPLSDDLRHELSWEAATERFIRVADXLHQLCLWDNHHPPRSISCASPQXELQKNMEEASAFFHNTISGFEAVRCVFGAIPNTLQPDEQQCKELGWNLQGXHXLFLRCCCHGP

SEQ ID NO: 421 - protein, 129 aa, Zea mays
MKSAQSTRKPSKASSSAGLKRGRRAAFESSESSISETSSDSEEEILKHGPSENRAGPGQQTRRSSRQKQEVKYNEDSDDDNYDAEDGNTVEDDFFGSPALKRLRKAGLFHGDHSTKTAKLNEDTTGHNG

SEQ ID NO: 422 - protein, 82 aa, Zea mays
MARTLSCKKCGHSSAAVRYPFEDLLLGFPSKGHPTKSAALPQTSESPGWAGSRKRVIARQLFPEDVQGSVDSEVFDVETLEV

SEQ ID NO: 423 - protein, 651 aa, Zea mays
  misc_feature (1)..(1): Xaa can be any naturally occurring amino acid
  misc_feature (423)..(424): Xaa can be any naturally occurring amino acid
  misc_feature (609)..(609): Xaa can be any naturally occurring amino acid
XNDLSGGIPAQLARCANLTLLNLAYNRLAGEVPDVLGELRSLQELIVSGNGLGGEFPRSILRCRNLSKLDLSYNAFRGDLPENICNGSRLQFLVLDHNEFSGGIPAGIGGCTRLLELQLGSNNLSGEIPAEIGKVKSLQIALNLSSNHFTGPLPRELGRLDKLVVLDLSRNEISGQIPGDMRGMLSLIEVNLSNNRLAGAIPVFGPFQKSAASSFSGNAELCGDPLTVDCGSSIYGSSYGTETDHRGISYRVALAVVGSCVLIFSLVSLLVALFMWRERQEKEEEEAKKKAAEVAVAAAAPQVVASAVFVESLQQAIDFQSCVKATFKDENEVGDGTFSTTYRAVMPSGTVVSVKKLKSVDRAVVQQRTKVVRELERLAHIGHENLVRPIGYVLYDDVALLLHQHLANGTLLQLLHDNGERRXXADWPRLLSIAVDVAQGLAFLHQVATVHLDVCSGNVFLDSRYNALLGEVEISRLLDPTKGTASISAVAGSFGYIPPEYAYTMRVTVPGNVYSFGVVLLEILTSKLPAVDEAFGEGVDLVKWVHAAPARGETPEQIMDPRLSAVSFAWRRQMLAVLRVAMLCTERAPAKRPRMKKVVEMLQEARDSXVVWFLCSMMCGWLLGTWNLEVEARNSELIIVGVRVWSPSGSV

SEQ ID NO: 424 - protein, 525 aa, Zea mays
  misc_feature (478)..(478): Xaa can be any naturally occurring amino acid
MSSEASSVVVADENGAAETVGVGRYVEMEKDQESSAAKSRLSGLLWHGGSAYDAWFSCASNQVAQVLLTLPYSFSQLGMLSGILFQLLYGLMGSWTAYLISVLYVEYRARKEREKADFRNHVIQWFEVLDGLLGRHWRNVGLAFNCTFLLFGSVIQLIACASNIYYINDKLDKRTWTYIFGACCATTVFIPSFHNYRIWSFLGLVMTTYTAWYLAVASLIHGQVDGVKHSGPTKMVLYFTGATNILYTFGGHAVTVEIMHAMWRPQKFKAIYLMATLYVLTLTLPSAASVYWAFGDQLLTRSNALALLPRTAFRDAAVVLMLAHQFITFGFACTPLYFVWEKLVGLHDCRSLCRRAAARLPVVVPIWFLAIIFPFFGPINSAVGSLLVSFTVYIIPALAHMITFRSATARENAMEPPPRLLGRWTGAYMINAFVVAWVLVVGFGFGGWASMTNFVRQIDTFGLFTKCYQCPPPPPLPXSPAAASATSRCHSTATGSLLPRLLRRRITSSATTGITATTAGSDERR

SEQ ID NO: 425 - protein, 44 aa, Zea mays
MRMNEQSVAFSAGHATELNVALSAADDVLPSPTGQAQWLARLFR

SEQ ID NO: 426 - protein, 867 aa, Zea mays
MSSLDPSPATSTQQQKQLESLVNLLTQGSRFYRKAYNELFSGVTTEQDPDSSTNIPEYMLFGWHLFLMLHLRSPELFKDLVSCIHGLVAVLAILLIHVPAKFRSFTIEGSSHLIKQTEKGVDLIASLCHNYHTSEERLKEMLHKSHNAIEDIFHMKALSASECKPENLDKIDTDDLMYFKGLIDMECFQSNLEKMEKLCNSNSCKGELDFKSILINNDYIPYDENSTGDSTNLGHSKCAFETLASPTKTIKNMLTVPSSPLSPATGGSVKIVQMTPVTSAMTTAKWLREVISSLPDKPSSKLQQFLSSCDRDLTNAVTERVSIVLEAIFPTKSSANRGVSLGLNCANAFDIPWAEARKVEASKLYYRVLEAICRAELQNSNVNNLTPLLSNERFHRCLIACSADLVLATHKTVIMMFPAVLESTGLTAFDLSKIIENFVRHEETLPRELKRHLNSLEEQLLESMAWEKGSSLYNSLIVARPSVASEINRLGLLAEPMPSLDDLVSRQNVRIEGLPATPSKKRAAGPDDNADPRSPKRSCNESRNTVVERNLQTPPPKQSHMVSTSLKAKCHPLQSTFASPTVCNPVGGNEKCADVTIHIFFSKILKLAAIRIRNLCERVQCVEQTERVYNVFKQILEQQTTLFFNRHIDQLILCCLYGVAKVCQLELTFREILNNYKREAQCKPEVFSSIYIGSTNRNGVLVSRHVGIITFYNEVFVPAAKPFLVSLISSGTHPEDKKNASGQILGSPKPSPFPNLPDMSPKKVSASHNVYVSPLRQTKLDLLLSPSSRSFYACIGEGTHAYQSPSKDLAAINSRLNYNGRKVNSRLNFDMVSDSVVAGSLGQINGGSTSDPAAAFSPLSKKRETDT

SEQ ID NO: 427 - protein, 63 aa, Zea mays
LQCAPENAWPAARRGRSVAPQGGDWRMEIEQWSLCMREKLLPHWIADSYSRYLDSRLNQAHGD

SEQ ID NO: 428 - protein, 242 aa, Zea mays
  misc_feature (73)..(74): Xaa can be any naturally occurring amino acid
MESKRVSDQDALIDLESGNGTTVSNYTNGGDASFTVGQARTAPNGAWNGCVCANGCPKSAHGLLPSCFGCCCXXSGDDRKSEGEEKLMDSSGGEKTKKKRSKKPPRPPRPLTPTPLDVSAQKLLNELSELAGLKRARIERMKALKKMKNAKQGSSGGNLCPLIITIIFCIVILWQGFFSGHAAVSFHGSPESSVRAHSSLISIRFYKKNHSNVRPPSETTAAPDKQFQGSWNRNQARRRLAR

SEQ ID NO: 429 - protein, 680 aa, Zea mays
  misc_feature (343)..(343): Xaa can be any naturally occurring amino acid
  misc_feature (680)..(680): Xaa can be any naturally occurring amino acid
MAMRSLCLPLLLFSVSISIPPAVSANEELASLLAFKVAAISGGYGDPLASWNESSAGGGGYCSWEGVRCWGKHRQVVKLSLPSRGLTGVLSPAIGNLSSLWTLNLSNNGFHNSIPASLGRLQRLHNLDLSHNAFSGKLPANLSSCTSLVSLGLSSNQLHGRVPPELGGSLKRLRGLDLFSNNFTGTIPASLANLSSLTILDLGLNQLEGSITPDLGGIQGLQWLSLDYNKLSGELPRSLLNLSSLITMQVQGNMLHGGIPSDIGSKFPNITILSFGKNQLTGSIPASLSNLTTLQDVDLITNRLSGHVPRALGRLRALESLSLHDNMLEANDTEGWEFMASLXNCSQLQSLTISTNSLTGWLPASIVNLSTTMQGLMLADTGIVGSIPLEIGNLFNLQFFSVSNTSVSGAVPDSIGKLVNLVELNLYNTNLSGLIPSSIGNLSELAALVAFNSNLEGPIPKSIGRLKNLYALDISSNRLNGSIPVEIFQLPLLSRYLGLLHNSLSGTLPAEVGSLINLNILALSRNQLSGEIPGSIGDCTVLQELGLDDNLFEGAIPQSLSNIKGLTGLNLFMNKSTGVIPEAIGSMRNLQQLYLAHNNLSWTIPIILQNLTLSELDLYLYNPQWEVPKEGIFKILANLSITGNNEPCGGITELRLPSVYKKVLKSNQKEKLKSFTIWLX

SEQ ID NO: 430 - protein, 235 aa, Zea mays
  misc_feature (1)..(1): Xaa can be any naturally occurring amino acid
XLAWFMSNQETSFVTIGQRVLANPLRVRFHYGHPDVFDRLFHVTRGGVSKASKIINLSEDIFAGFNSTLREGNVTHHEYMQVGKGRDVGLNQISLFEAKIANGNGEQTLSRDIYRLGHRFDFFRMLSCYYTTIGFYFSTMITVWTVYVFLYGRLYLVLSGLDEALATGKRFVHNTPLQVALASESFVQLGFLMALPMMMEIGLERGFRTALSDFILMQLQLASVFFTFSVGTKTH

SEQ ID NO: 431 - protein, 79 aa, Zea mays
  misc_feature (1)..(1): Xaa can be any naturally occurring amino acid
  misc_feature (12)..(12): Xaa can be any naturally occurring amino acid
  misc_feature (31)..(32): Xaa can be any naturally occurring amino acid
  misc_feature (79)..(79): Xaa can be any naturally occurring amino acid
XAAYIISVAELXVLAARLFLLNWHFEICSCXXRTPMWFKRMLSPSKKTENSPVFRFFMDLNDAVSYVKRLNVPSGMVGX

SEQ ID NO: 432 - protein, 538 aa, Zea mays
  misc_feature (14)..(14): Xaa can be any naturally occurring amino acid
  misc_feature (172)..(172): Xaa can be any naturally occurring amino acid
  misc_feature (192)..(192): Xaa can be any naturally occurring amino acid
  misc_feature (202)..(202): Xaa can be any naturally occurring amino acid
  misc_feature (245)..(245): Xaa can be any naturally occurring amino acid
  misc_feature (255)..(255): Xaa can be any naturally occurring amino acid
MHSTNLLLEEPIRXMASILEPSKPSYFPAMTKIVGTLGPKSRSVDTISACLKAGMSVARFDFSWGDAAYHQETLENLKLSIKSTKKLCAVMLDTVGPELQVVNKSETPISLEENGTVVLTPHRGQDASSSLLPINFSGLAKNCSLQAVTPGATIFVGQYLFTGSETTSVWLXEVSEVKGDDVVCIIKNTATXLAGSLFTLHXGSQIHIDLPTLSERDKDVIRKWGTPNKVTFLSLSYTRHAEDVXRQAREFLSKXLGDLSQTLIFAKIENVEGLNQFDEILAEADGIILSRGNLGIDLPPEKVFLFQKSALHKCNMAGKPAVVTRVVDSMTDNLRPTRAEATDVANAVLDGSDAILLGAETLRGLYPVETISTVGRICAEAEKVFNQDLYFKQTVKYVGEPMTHLESIASSAVRAAIKVKASVIICFTSSGRGCRLIAKYRPTMPVLSVVIPRLKTNQLRWSFTGAFEARQSLIVRGLFPMLADPRHPAESTSNTNESVLKVALDHGKACGVIKSHDRVVVCQKVGDSSVVKIIELDD

SEQ ID NO: 433 - protein, 516 aa, Zea mays
  misc_feature (74)..(74): Xaa can be any naturally occurring amino acid
PPLGTLRPAGARSQQDTTHLLLPRLVSIATTLFSCGPPPSHSHPPRLRLHCSCRHAEPPPAHRCRGPGGASVRXRRNLPGRLSVRASATVVAAPRRETDPKKRVVITGMGLVSVFGNDVDAYYDRLLVGESGIGPIDRFDASKFPTRFAGQIRGFSSEGYIDGKNDRRLDDCLRYCIVSGKKALEASGIAHGSKPMEKIDKTRAGVLVGTGMGGLTVFSDGVQNLIEKGYRKITPFFIPYAITNMGSALLGMDIGFMGPNYSISTACATSNYCFYAAANHIRRGEADIMIAGGTEAAIIPIGVGGFVACRALSQRNDDPKTASRPWDKDRDGFVMGEGAGVLVMESLEHAIKRDAPIIAEYLGGAVNCDAYHMTDPRSDGLGVSSCIKQSLEDAGVAPEEVNYINAHATSTLAGDLAEVNAIKQVFKDPSGIKINATKSMIGHCLGAAGGLEAIATVKAITTGWVHPSINQFNPEEAVEFDTVPNVKKQHEVNVGISNSFGFGGHNSVVVFAPFKP

SEQ ID NO: 434 - protein, 369 aa, Zea mays
  misc_feature (144)..(145): Xaa can be any naturally occurring amino acid
  misc_feature (334)..(334): Xaa can be any naturally occurring amino acid
MSTANHYQHIKSTKPVVGKARKLKDLMIKSDNRICADCGAPDPKWASANIGVFLCLKCGDVHRALGPDISKVLSVTLDDWSDSDIDSMVEVGGNSYANSIYEAFLPKDHPKPKPDSTMEYRTKFIRAKYETQDFLKPSLRISSXXSSFKSTTSVKSVDSNFSSTSRKDVFEDTREFVGELNITLVKGTNLAVRDMLTSDPYVVLTLGGQKVQSTVKKSDLNPVWNEVLKISVPRNYGPLKLEVYDHDMFSADDIMGEAEIDLQPMITAAMAFGDTSRLGDMQIGRWFMTKDNALMKDSTVNVVAGKVKQEVHLKLQNVESGELELELEWVPILXTNDNSPDLCLKIYTQDASMFPSCPLDGLGHFCWMV

SEQ ID NO: 435 - protein, 444 aa, Zea mays
  misc_feature (47)..(47): Xaa can be any naturally occurring amino acid
  misc_feature (148)..(148): Xaa can be any naturally occurring amino acid
  misc_feature (275)..(275): Xaa can be any naturally occurring amino acid
  misc_feature (326)..(327): Xaa can be any naturally occurring amino acid
  misc_feature (334)..(335): Xaa can be any naturally occurring amino acid
  misc_feature (414)..(414): Xaa can be any naturally occurring amino acid
MPPPPPPPPGLPSLAPSPPRPPPSRRRRLRSCASTAPAAAAASREPXRHHAYSRKQKSLGLLCSNFVALYDREDVEVIGLDDAAKRLGVERRRIYDIVNVLESVGILVRRAKNRYTWLGFGGVPAALKELKERALRKMYHRCYCQWRXSSTANLSDDEDDDDEDAESEKLSQPVDNTSDKPDAPSCRLRSDHRKEKSLGLLTQNFVKLFLNMEVGTISLDEAARLLLGEGHADSNMRTKVRRLYDIANVLSSLNLIEKTQQADTRKPAFRWLGQXQSESKITMSSPSMKAMPNKRAFGTDLTNIDNKRGKLDSAAENKVKLMQGAXXNIVKTFXXRQLVQGKRSDFVYGPFHPAGAKKHETDDQTVKQQERKNIQDWENLAVSFRPQYQNQALNDLFGHYVEAWKSWYVDLTQXNGIMKQNVGRSVVTCKPFPVVRSTELLMLA

SEQ ID NO: 436 - protein, 128 aa, Zea mays
  misc_feature (11)..(11): Xaa can be any naturally occurring amino acid
  misc_feature (60)..(60): Xaa can be any naturally occurring amino acid
  misc_feature (128)..(128): Xaa can be any naturally occurring amino acid
MTGFSAAASAXRRLSGARSRSAHGPRPPRQRSGSSSRSQRPSDAAGASAAPPRSPPLAAXPVVPRAVATSADRASPDLIGKFTLDSNSELQVAVNPAPQGLVSEISLEVTNTSGSLILHWGALRPDKX

SEQ ID NO: 437 - protein, 634 aa, Zea mays
  misc_feature (2)..(3): Xaa can be any naturally occurring amino acid
  misc_feature (565)..(565): Xaa can be any naturally occurring amino acid
PXXRPLLRSLLNADLIGFHTFDYARHFLSCCSRMLGLKYESQRGYIALEYYGRTVTIKILPVGVHLEQLRSVLNLPELGVKVAELLKQFCHRNRLLLLGVDDMDIFKGISLKLLAFEQLLMQHPEWRGRVVLVQIANPARGRGKDVREVQEESDAMVRRINDAFGQPGYQPVILIDQPLQFYERMAYYVVAECCLVTAVRDGMNLIPYEYVIARQGNERIDSILGLGPASRKKSMLVVSEFIGCSPSLSGAIRVNPWNIDSVADAMDYALEMPEGEKVLRHEKHHRYVSTHDVGYWANSFLQDLERICLDHNRRRCWGIGFGLKFRVVALDPNFKKLAVEHLVLAYRRTKKRVILLDYDGTLMPQTSLGKSPTSRTIDMLNSLCRDRNNMVFLVSAKSRMTLNEWFLPCESLGLAAEHGCFLRLRRDAEWETCVPVIDCSWKQIAEPVMKTYTETTDGSTIEDKETAIVWCYEDADPDFGSCQAKELHDHLESVLANEPVSVKAGPNLVEVKPQGVSKGLVAKRILSTTQERGDADDDLPDFVLCVGDDRSDEDMFEVIAAAAAXEGPSLQAEAEVFACTVGRKPSKAKYYLDDPADIVRLVQGLASVSDDDQTHAPPPPPSAAATMTTDTVPR

SEQ ID NO: 438 - protein, 974 aa, Zea mays
MVSGHIFHCRKNSWPAEEYVGRTALQLLDFDGGAPPEQAWRRRLNSHANILKEFSVTFMEAMRMMSLGLRLWSYVREEASHGRKAPIDPFTKERCKPSASQGVPLGGMGSGSISRGFRGEFKNWHIIPGLCESSPVMENQFSIFVSRDGGNKKYSSVLAPGHHEGLKKNSDSGISSWDWNLSGQHSTYHALFPRAWTVYDGEPDPDLKISCRQISPFIPHDYKDSSLPTSVFVYTLVNTGRDRAKVSLLMTWANSIGGFSHNSGGHYNEPFIAEDGVSGVLLHHKTAKDNPPVTFAVAACETQNVNVTVLPVFGLSGENHVSAKEMWNTMLQNGHFDRENFSAGPSMPSSPGQKLCAAVSASTWVEPHGRCTVVFALAWSSPKVKFQKGCTYNRRYTQFYGTSEKSAVNLVHDALTKYKLWEEEIEKWQNPILKDERLPEWYKFTLFNELYFLVAGGTVWTDGQPPAIDEKKSPGFNHQKSSKRGTKDTNQGSVKDRHVNLAVEQVPHGGYMANGDDHSVSKFAAVHGSELQEQTNGLKSEEPIPYLISKDGPEHVGKFLYLEGVEYIMWNTYDVHFYASFALLDLFPKIELSIQRDFANAVLYEDRRKVKFLADGTSGIRKAKGAVPHDLGTHDPWHEMNAYNIHDTSKWKDLNPKFVLQIYRDFAATGDMQFGRDVWPAVCAAMDYMDQFDRDGDGLIENDGFPDQTYDAWTVHGISAYCGCLWLAALQAAATMAHRLGDRHFAEKYKLKFIKAKAVYEAKLWNGSYFNYDSGTSSNSRSIQADQLAGQWYAASSGLPPLFDEHKIRTALQKIFEFNVMKVKGGRMGAVNGMTPKGKVDETCMQSREIWTGVTYAVAANMLLHGMEHQGFTTAEGIFTAGWSEEGYGYWFQTPEGWTTDGHYRSLVYMRPLAIWAIQYAVSPPKAILEAPKVNLMDRIHISPHMVRAISEISIRKVAPDNRCLPSSAFHCEC

SEQ ID NO: 439 - protein, 602 aa, Zea mays
  misc_feature (1)..(1): Xaa can be any naturally occurring amino acid
  misc_feature (96)..(96): Xaa can be any naturally occurring amino acid
  misc_feature (117)..(117): Xaa can be any naturally occurring amino acid
  misc_feature (384)..(385): Xaa can be any naturally occurring amino acid
  misc_feature (591)..(591): Xaa can be any naturally occurring amino acid
XQSYHNSMVRRLREIKDCWKGREGYSLDERLRMLDTMKAKQQHQQQQQRKALDFTRRAGSETDSEHEVNEDANDSFRLAEYERLASRSGHAVQDSXMVVMVVLKEPALAPKKQKEEXEVPSLDEHGDLSSGPKVVENTGGSKKKSKKKPESSTTDAVILAEPAVAVPENNVIAAEPEKVEKPKKKYVPITPTIHTGFSFSVVHLLTAVKKAMVTPAEDTPPATAKRSKTPHQEQSATDQTEQVLEGANASAVEQTVPINTPALTVQEIVNRIRANPGDPRILETQEPLQDLVRGVLKVLSSRTAPLGAKGWKALVAYEKSNKSWFWVGPAPSVSSYDDPDEETSAEAWSIPHKMLVKLVDAFSNWLKSGQETLKQIGSLPPPPXXPNPANLDLKERFKELKAQKSLNTISPSSDEARTYFQREEFLRYSIPDRAFCYTAADGEKSIVAPLRRGGGKPTAKARGHPMLLPDRPPHVTILCLVRDAASRLPARTGTRADVCTLLRDSQYLNHEEANKEVNQVVSGALDRLHYERDPCVLYDNDKKLWTYLHRGREEEDFEDDGTSSTKKWKRPRRDVSDAAEPGAANDVAMLXKKKKKKKKKKK

SEQ ID NO: 440 - protein, 140 aa, Zea mays
  misc_feature (115)..(115): Xaa can be any naturally occurring amino acid
NWSQLFVGQLDQSVTSEDLMQAFSPYGELVDVKALPGKGCGFVTYSNRASAEEAIRMLNGSQLGGKAIKLSWGYPSADKQAQRNSSGGFGRDCFVWSPQYPYAYAQTCQPGYGYXNYRQQAAHSAVRSCEEKMSVTRNSC

SEQ ID NO: 441 - protein, 442 aa, Zea mays
  misc_feature (116)..(116): Xaa can be any naturally occurring amino acid
MADTPSPSPTAAAGAEPGSASTPLLRRRGSYTRTVSHARDELSSFRSGLRWMCVDHSDASSPAVSWLVFAALGVAVPAAAQAAAPRRAYDTQVQVSLTLSAALAYTTLYSLVRRRXGLRRLLYLDRLRHDSQDVRAGYIVQLAGSFRLLACFVLPCFLADAAYKAFWYCANRPFPLWWSAAACALEMASWMYRTAMFCMACVLFRTICYLQILRMTGFARDFGQCADVAAVLRQHRRIRVQLQRISHRYRSFILYSLILVTASQFTALLAATRPHARVNFATAGELALCSMSLVTGLLVCLHSAAKITHKTQSITSVAAAWHADATINSLDRDQENPRTPSKACLQQQTPTSPFPMAGASSGEESDDDEWRSEDGVDTSRFTPFHATNVSFQKRQALVTYLENNRAGITVFGFVVDRTWLHALFMIEFSLVMWLLGKTIGIS

SEQ ID NO: 442 - protein, 214 aa, Zea mays
  misc_feature (6)..(6): Xaa can be any naturally occurring amino acid
  misc_feature (214)..(214): Xaa can be any naturally occurring amino acid
FVMDSXNNSVLPWGLECLQHSTPCFLGSPKSASFAVDCGGSRAISGSDNSVYQADNANLSAASYYVAGAPTWAVSSVGLFLDADAPNASYIIYSSRQFENTLDSALFQTARMSPSSLRYYGIGLENGNYTVTLQFAEVDFPDMQSWRSRGRRVFDIYVQGERKEQNFDIRKAAGGKSFTAVKKQYVVPVTKNFLEIHLFWAGKGTCCIPYKGYX

SEQ ID NO: 443 - protein, 233 aa, Zea mays
  misc_feature (48)..(48): Xaa can be any naturally occurring amino acid
  misc_feature (233)..(233): Xaa can be any naturally occurring amino acid
PRVRPVSRRSSGGGGEKAAAAPLLGGEAGGGARRGRRRRRRRGWGAWXDAAEARAQLGFAVPMVLTSMAYYGIPLVSVMFSGQLGDVHLAGATLGNSWATVTGYAFVTGLSGALETLCGQAYGAGLHRMLGLYLQSSLIMSAAASALVSALWWFTEPVLLLLRQEPEASRAAAAFVRAQAPGLFAFSFVQCLLRYLQTQSVVLPLVACSVAPFALHVALAHLMVNVLGLGLTX

SEQ ID NO: 444 - protein, 115 aa, Zea mays
DRLTQAKPYLSDGVVQGVVDPRLGDGYDGGQLRRLMFVASLCVRAAAVWRPTMTQVVELLESGEISQEQWQMPEEEEQDELWDFDDLDDFDEDDYDDESDSPSISSSACSIHPDD

SEQ ID NO: 445 - protein, 190 aa, Zea mays
MMPNAVTNSTKDVLEADDTTFNNEFPIKLDQLGDDPVISLGNMLVELIQHEDSCSGDSNGPTSTYKLLLLKESISKEIEKTELEIDSLEGELKSVNTEAATTLEGSPTGVTHTENLSPSSGTSKVPGSVEICDTSDMIKEPGELIGSPKVPVVQYDDVKSADMMEIETAPVHNAKTVPSEAGAISPVVAE

SEQ ID NO: 446 - protein, 415 aa, Zea mays
  misc_feature (91)..(92): Xaa can be any naturally occurring amino acid
MGIPSDDVVQIRHADAAGEPTVVTVSCPDKTGLGCDLCRVVLLFRLSVVKGDMSTDGRWCYIVLWVLPRGGRPVPVPWDLLKDRLLQLCPXXAPPFGFDNAYLAAAEDLAPPPPKLFLLKLCCFDRMGLLHDVTRVLCELELTIRRVKVSTTPDGSVLDLFFITDARGLLHTKSRREETQDRLESVLGDSLTCCEIDPAGEDMVSCCLQSWAWASLTPAVIAQMFSTGGGGGTIISVTMDNSLSPAHTLIQIQCGDHKGLLYDVMRIVKDCNIQISYGRFYASQNGRCEIDLFAVQSDGKKILDQHRQRALCCRLRMELRRPLHVALVNRGPDTELLVANPVEVSGKGRPLVFYDITLALKNLQRRIFLAEIGRHVVEGREWEVYRLHFGEEHELSSALRKKIVDAVTNMLMGWD

SEQ ID NO: 447 - protein, 515 aa, Zea mays
SHLEAGRAQAPIFVFSPQNTATFYRSDLPLFPNSPRLPLRPSQISTTHRGHGRAMPPSADAMPAPGDGAGDVRLISSKELREHASAADLWISISGDVYDVTPWLPHHPGGDLPLITLAGQDATDAFAAYHPPSARPLLRRFFVGRLSDYTVSPASADYRRLLAQLSSAGLFERVGPTPRVQLALMAVLFYAALYLVLACASASAHMLAGGLIGFVWIQSGWMGHDSGHHRITGHPLLDRVVQVLSGNCLTGLSIAWWKCNHNTHHIACNSLDHDPDLQHMPLFAVSPKLFGNIWSYFYQRTLAFDAASKFLISYQHWTFYPVMCIARINLLAQSAVFVLTEKRVPQRLLEIAGVAAFWAWYPLLVACLPNWWERVAFVLLSFTICGIQHVQFCLNHFSSDVYVGPPKGNDWFEKQTAGTLDILCPPWMDWFHGGLQFQIEHHLFPRLPRCHLRKVAPAVRDLCKKHGLTYSAASFWDANVLTWKTLRAAALQARSATGGGGAPKNLVWEALNTHG

SEQ ID NO: 448 - protein, 442 aa, Zea mays
  misc_feature (1)..(2): Xaa can be any naturally occurring amino acid
  misc_feature (28)..(28): Xaa can be any naturally occurring amino acid
  misc_feature (231)..(231): Xaa can be any naturally occurring amino acid
XXNGQALQFVYGSKQVFTQGGILAATVXSTNLYRSQRFKEAMKDVMTQCCSPDEVIFGPDFHQSLYCHLLCGLIYSDEIQFVFSPFAHGLVHACHSLEEVWEDLCADIRDGVLSKRVTAPSIRQAVSKILRPNPELASSIYIKCQSLSNWYGVIPTLWPNVKYIYGIMTGSMEPYLKKLRHYAGHLPLLSADYGASEGWVGSNVNPTLPPEEVTYAVLPNIAYFEFIPLEXTKMGESEPVGLTEVEVGKIYEVVITNFAGLYRYRLGDIVKIAGFRNATPELQFICRRSLVLSVNIDKNTEKDLQLAVEAAEKLLAAEKLEVVDFTSLVDRSSEPGHYVVFWELSSDDGASEDVLSGCASCMDLAFADAGYVGSRKTQTIGALELRVLRKGAFAQVMNHYLSLGGAVSQFKTPRFVSQSNSKVLQILSRNVTRSYFSTAYGL

SEQ ID NO: 449 - protein, 113 aa, Zea mays
LGNNKLPIVHRQSPCSPLHGLPSLTAADVLRRDTSRIRRRFASQSSSVVASLASALAPAPAPAATIIPIDGSPDAGALDYTVNVGYGTPEQQFPMFLDTIFGVSLVLCKPCAP

SEQ ID NO: 450 - protein, 99 aa, Zea mays
FQLLLSDSDEFLLLLRSPADVLLLIDSDEFRLLLPSPADVLLSQVNLTMFPSSEEQSLSDPAFWKSAEENTDNGGNPRLLSDSSFHSCNPGSAREPTRP

SEQ ID NO: 451 - protein, 583 aa, Zea mays
  misc_feature (112)..(113): Xaa can be any naturally occurring amino acid
VLTPPHAHKPPAATRPTTSRTSLARFSSPARCRLVGTMSSEPPPAPSAAAAEGLAADLSAATLSKKQQKKDARKAEKAEKAAQRQQQQQPADAEDPFAANYGDVPVEEIQSXXAISGRLWSQIGDLDDSSAGRSVLIRGSLQAIRPVSKKMAFVVLRQSMSTVQCVLVASADAGVSTQMVRFATALSKESIVDVEGVVSLPKEPLKATTQQVEIQVRKIYCINRAIPTLPINLEDAARSEADFEKAELAGEKLVRVGQDTRLNYRAIDLRTPSNQAIFRIQCQVENKFREFLLSKDFVGIHTPKLISGSSEGGAAVFKLLYNGQPACLAQSPQLHKQMALCGGFERVFEVGPVFRAENSNTHRHLCEFVGLDAEMEIKEHYFEVCDIIDGLFVSIFKHLTENCNKELETINRQYPFEPLKYLDKTLKLTYEEGVQMLKEAGTEIEPMGDLNTEAEKKLGRLVREKYDTDFFIMYRYPLAVRPFYTMPCYDNPAYSNSFDVFIRGEEIISGAQRIHTPELLTKRATECGIDVSTISTYIEVFSYGAPPHGGFGVGLERVVMLFCALNNIRKTSMFPRDPQRLVP

SEQ ID NO: 452 - protein, 60 aa, Zea mays
  misc_feature (1)..(1): Xaa can be any naturally occurring amino acid
XAAHRYGIKRVILPERNLKDLSEVPSPILSGMEILLVKHIEDVLDHAFEGGCPLKSRSKL

SEQ ID NO: 453 - protein, 136 aa, Zea mays
  misc_feature (75)..(75): Xaa can be any naturally occurring amino acid
  misc_feature (86)..(86): Xaa can be any naturally occurring amino acid
  misc_feature (114)..(114): Xaa can be any naturally occurring amino acid
KSKRNLHLATLPCHEYFKAAADGEETGDCAVCLEAFEAGDRCRQLPRCEHSFHAECVDSWLRKSSACPVCRVDAXGPAAAQGRGEXAAAVSGVVVDMAGRRSSRPALEIVIERXVACVRPMAVGNRDGDKLRWGNT

SEQ ID NO: 454 - protein, 140 aa, Zea mays
  misc_feature (1)..(1): Xaa can be any naturally occurring amino acid
  misc_feature (133)..(134): Xaa can be any naturally occurring amino acid
  misc_feature (140)..(140): Xaa can be any naturally occurring amino acid
XAVDSASPPNPLTSAPKQSQSAAMQNGTSGGSSASTAAPVSGPKADHPSAPVTKREIDASAVKPEPAGDDARPVESIGIAEPVDAKADAAPATDAAASAPYDREDNEPGPLAGPNVMNVVVVASECAPFCKTXXGCISGX

SEQ ID NO: 455 - protein, 399 aa, Zea mays
MMNLSAAANGRDEFPPYVVPSNAAAPPPSLLPTMEQQQESSIHREHHQLLGYNLEANSLALLPPSNAAAAHHHTTFAGGHSPHDILHFYTPPPSAASHYLAAAAGNPYSHLVSAPGTTFHQTSSSYYPPAAAAQAAPEYYFPTLVSSAEENMASFAATQLGLNLGYRTYFPPRGGYTYGHHPPRCQAEGCKADLSSAKRYHRRHKVCEHHSKAPVVVTAGGLHQRFCQQCSRFHLLDEFDDAKKSCRKRLADHNRRRRKSKPSDADAGDKKRAHANKAAAAKDKAESSSKNMDIGDGLGAQILGSALLSKEQDQTMDLGEVVKEAVDPKGKASMQQHYGFPFHSSSAGSCFPQTQAVSSDTTSNIGQVQEPSLGFHHQHHQHSNILQLGQAMFDLDFDH

SEQ ID NO: 456 - protein, 323 aa, Zea mays
  misc_feature (186)..(186): Xaa can be any naturally occurring amino acid
  misc_feature (201)..(201): Xaa can be any naturally occurring amino acid
IRHEATYIDMAVLNLLALIIATLLLLFRRTSGAGTPADTLNSGGNVTDGETLVSAGGTFTLGFFSPSTTVLTKRYLGIWFTASGTDAVLWVANRETPLNNTSGVLVMSSRVGLRLLDGSGRTAWSSNTTGAPTSSVAQLLGSGNLVVREKSSNAVLWQSFDHPQNTLLAGMRFGKNLKTGMEWSLXTSWRAQDDPATGDYXGRVMDTKGLPDIVTWHGNAKKYRAGPWNGRWFSGVPEMDSGYKLFSVQMVDGPDEVTYVLNTTAGIPFTRVVLDEVGKVRVLMWLPTSRVWKEYPWLPRDACDEYTSCGAFGLCNVDAAPTA

SEQ ID NO: 457 - protein, 120 aa, Zea mays
  misc_feature (1)..(1): Xaa can be any naturally occurring amino acid
  misc_feature (100)..(100): Xaa can be any naturally occurring amino acid
  misc_feature (120)..(120): Xaa can be any naturally occurring amino acid
XDISFIVILLKSLRRMNHPNIVKLKEVIRENDILYFIMEYMECNLYQLMKERVKPFSESEVRNWCFQIFQALAYMHQRGYFHRDLKPGRISVNSDYQSIXYCNIGSVVNSRTPCTYPPSX

SEQ ID NO: 458 - protein, 346 aa, Zea mays
  misc_feature (1)..(1): Xaa can be any naturally occurring amino acid
XFVSVCIAEHVFFYQDLTLLLCTSGRDPGIIPRNTHPPEPESIDGINDTGVQTPQQFRLPRTKEVVVNGISVRVKYCDTCMLYRPPRCSHCSICNNCVERFDHHCPWVGQCIGLRNYRFFYMFVSSTTLLCLYVFAFCWVYVIKIRAAEHLSIWKALLKTPASIVLIIYCFLCVWFVGGLSVFHLYLMGTNQTTYENFRYRYDRRDNPYNRGTLNNFLEIFCTAIPPSKNNFRARVTVEQGLQQTRSQSRGFMSPSMGKPTIGELEMGRKPVAWDEPRTAADIRDLEAGHASPDLSRDLPAEFVEGRTGMHSRQSSDLQQKLHKRKNSQRSFISIDPTFRLSTNLQ

SEQ ID NO: 459 - protein, 192 aa, Zea mays
LMDPMQSSVRGRRSSLHADAVITIGGVRPAPPPQTSTQHVCQDEAMVSSGDPSWMSGYSTDSCRGGYYTSALNLEGASIRELKLKYQKLKYRNKPNNCNADDHVNAERSPGRKAEEKKVLARKHEDCDDDPFIEEVKKMREAHQEIERDRKARDDKFYELEKIKLDLKRDRLDTMIMQTDTSAMDSEARTIL

SEQ ID NO: 460 - protein, 520 aa, Zea mays
  misc_feature (2)..(2): Xaa can be any naturally occurring amino acid
  misc_feature (72)..(72): Xaa can be any naturally occurring amino acid
  misc_feature (109)..(109): Xaa can be any naturally occurring amino acid
  misc_feature (119)..(119): Xaa can be any naturally occurring amino acid
IXCVIILHQREPTMSIHQQQQLQEWLLGTPRPDVLPGQQQGRADGEDGRVSHRPQPQGGPPHGGERREREKXRPPTTKLSELESQLSQLQEELKKAREQLHSSELSRKXRALQEADDAXRAQAAAASAQARDTEAQLAELSSAEESRLLELRRLSQERDRSWQSELEAMQKQHAADSTALAAAMGEVHRLRVQLAATARADRRQDVVEALATINELRAKLKASEEAEAQARAMHEECKQQLEASRATIDSLLTDGSKLMDSFSLVVKELEESRATVKALEDEIAETSSRAAGDHCSCSGSESEASELRAELEAAEARYQEEKILSTVETQCAYELMDQIKTESDLRHGKLAAALEGAKSEVIFLKASLFDKESELRSALDAIKKLQAETRADGSADALKQQLQCALHENGQLKQELHQYESEKGSATARTAEADASEAAKKGEMETELRRLRVQAEQWRKAAETAMALLTVGKGGNGKFVERSESWEGVKYAGLCEELDDDAAVRKNGNVLRRISGMWKK

SEQ ID NO: 461 - protein, 531 aa, Zea mays
  misc_feature (32)..(33): Xaa can be any naturally occurring amino acid
MPPPLLEFAILATACRFSKPLTVLRRLGVLGXXPTVRRNAAEAFVPSPFRQVVVQSGKLLGTPRFCHTTAAECLPDVYASQVLKVLKSTSADNTDLSGALHQFAVHMDEDIILMVLQKQRSNWQVALAFFNWAATLPGYAHGSRAYTEMLDILGRMKKVRHMRQLFDEIPEERRQVVVTNKMFAVLLNRYAGAHKVQEAIEVFYLRKDYGFELDLVGFQILLMSLCRYKHVEEAEALFREKKDEFPHVTKSWNIILNGWCVKGSLRDAQRIWNDIIASKVERDLFTFGTFINALAKNGRISAAVKLFKQMWEKGINPDVAICNCIIDQLCFKKKIPEALEIFGEMNDRLCQADVATYNTLIKYMCKIKRMEKVYELLDDMEAKGCPPNNRTYSYILKTTEKPKDVIALMQRMERTGCKLDSDIYNLILNLYIKWKYEKGMQQIWDEMERRGSGPDQRSFTIMVHGLHSQGKLDEALQYYTTMKSRGMIPEPRTKILVKAMHMKKDGAATEDDSARKHLKLDHRSRLFNVHR

SEQ ID NO: 462 - protein, 72 aa, Zea mays
LASLYCQPHYKISSFCFFGTKHFLIDSCARKMFFIYRTMVPMRKSSPCRIFISRNPVFSQALPQSRITLVQQ

SEQ ID NO: 463 - protein, 1055 aa, Zea mays
  misc_feature (322)..(322): Xaa can be any naturally occurring amino acid
MQSMESLAQLEVLCEKLYNSRDSAQRAHAESTLKCFSENSEYISQCQYILDNASTPYALMLASSSLLKQVSDRSLSLMLRLDIRNYVINYLGTRGPKLQNFVIVSLIQLVCRITKFGWFDDDRFRETVKEATDFLGLASQDHYFIGLKILNNLVTEMNQPNPAMPLTLHRKIAGSFKDQFLLQIFQISLTSLNQLKSEAPDDFGHIPLDLALKCLSFDFVGSPVDESSEEFGTVQLPASWRPLLQDPSTLQIFFDYYKVNDIRVSKEALECLVRLASVRRSIFVEDPARSQFLSHLMLGTKEILLTGQGLADHDNYHEFCRXLGRFKVNYQLAELLNVEFYGEWIGLVAEFTTRSLLSWQWASNSVYYLLSLWSRLVTSVPYLKGETPSLLDETVPKITEGFITSRINSVQAILADNSLENPLDSVEVLQDQLEFLPFLCRFQYQSSSLYIINIMEPLLQAYTERSRLPAPGDADELSVIEGQIAWMVHIIAAIVKVRQVTGVSQETQELIDAELSARVLQLISVTDTGAHTQRYQELSKQRLDRAILIFVQSFRRSYVGDQAMHSSKLYGRLSELLGLNDHLILLNVIVGKIATNMKCYAESEDVIDHTLSLFLDLATGYMTGKLLLKLESVKFIIANHSPENFPFLAEYKCSRSRTTFYYILGSLVFMEDSPVKFRTFMEPLQQVALNLEATPDAAFRTDVAKRAFVGWMRDLRGIAMATNSRKTYGLLFDWLYPSRMPLLLRAISLCTDEPEVTTPLLKFTYEFVLNKAQRLTFDSSSPNGILLFREVSKIIVAYGSRILLLPNGTDIYGSKYKGIWISLTVLSRALCGNYVNFGVFELYGDRALADALDISLKMTLSVPLSDILAFKKLSKAYFGYMEVLFNNHIKFVLNLDTNTFIHIVSSLESGLKGLDAGISSQCASAIDNLAAFYFNNITSGDSPPSPASVNLARHIGECPNLFPQILKTLFEIMLFEDAGNQWSLSRPILSLIMTSEQMFSELRAHILASQTVDQQQRLSQCFDKLMTDVNRNLEPKNRDRFTQNLTAFRRDFRLK

SEQ ID NO: 464 - protein, 410 aa, Zea mays
  misc_feature (249)..(249): Xaa can be any naturally occurring amino acid
MATRVLPPALLSFILLLLLSLSARDTVAAGEDFPRDGRVIDLDDSNFEAALGAIDFLFVDFYAPWCGHCKRLAPELDEAAPVLSGLSEPIVVAKVNADKYRKLGSKYGVDGFPTLMLFIHGVPIEYTGSRKADQLVRNLKKFVSPDVSILESDSAIKNFVENAGISFPIFLGFGVNDSLIAEYGRKYKKRAWFAVAKDFSEDIMVAYEFDKVPALVAIHPKYKEQSLFYGPFEENFLEDFVRQSLLPLXVVPINTETLKMLNDDQRKVVLTILEDDSDENSTQLVKILRSAANANRDLVFGYVGIKQWDGFVETFDVSKSSQLPKLLVWDRDEEYELVDGSERLEEGDQASQISQFLEGYRAGRTTKKKITGPSFMGFLNSLVSLNSLYILIFVIALLFVMTVLKKKKKK

SEQ ID NO: 465 - protein, 357 aa, Zea mays
MADNSIEQALIENPPNVLKWKPSERAKRFRRCRSTPSDPTDQKPAENGSVLKAKELFKEKRPSFMLVGLLLFAYLLVGVIIFYLFMDQLSGKTTNRVLDALYFVIVTMTSVGYGDLFPNSDTTKLLACAFVFTGMAIIALFISKAADYLVEKQEVLFFKALHMNMKGSEAKMLGAMETNRIKYKFYTVALLLAMVIDAGTVFLWKVEKLSLVDSFYCVCATITTLGYGDKSFSSKLGRVFAVFWITTSTLIMAQFFMYLAELYTERRQKILTKWVVNRRITTMDLEAADIDDDRQVGAAEFVLYKLKELGKISQEEISCFLEEFDKLDVDQSGTLSTYDLTLGQTIPDDAYVILLTE

SEQ ID NO: 466 - protein, 88 aa, Zea mays
GFLLATAGGGGGVGDGRLRLGRSAGWPGRRTAANSQLVMFMGCMRAFRRGAIQEVSRDLGGGMVEDNLKASATPLPACGLLLARTQAV

SEQ ID NO: 467 - protein, 423 aa, Zea mays
  misc_feature (1)..(1): Xaa can be any naturally occurring amino acid
XSNGVFEVKATNGDTFLGGEDFDNTLLEFLVSDFKKTEGIDLSKDRLALQRLREAAEKAKVELSSTSQTEINLPFITADASGAKHLNITLTRSKFESLVHDLIERTRDPCKNCLKDAGISTKEVDEVLLVGGMTRVPKVQEVVSEIFGKNPSKGVNPDEAVAMGAALQGGILRGDVKELLLLDVTPLSLGIETLGGIFTRLINRNTTIPTKKSQVFSTAADNQTQVGIRVLQGEREMATDNKLLGEFDLVGIPPAPRGLPQIEVTFDIDANGIVTVSAKDKATGKEQNITIRSSGGLSEADIQKMVQEAELHAQKDQERKALIDIRNNADTTIYSIEKSLGEYRDKIPAEVASEIEAAIADLRQEMASDDIEKIKAKLEAANKAVSKIGQHMSGGGSGGSQSGSGPQGGGDQAPEAEYEEVKK

SEQ ID NO: 468 - protein, 138 aa, Zea mays
LSCHRRLFLSSLATTAAFLACQASPIVVGAAPAEAASYAAKSLMPMPMPMPSCMPLAACKLQTLHANQFALLSGITQTGSVDEPPAAGCRRQDGSIRMNTTAATLLFPGKRIAAAVLLLWSFPVLIGWRHSFHTSMGC

SEQ ID NO: 469 - protein, 143 aa, Zea mays
  misc_feature (16)..(16): Xaa can be any naturally occurring amino acid
  misc_feature (33)..(33): Xaa can be any naturally occurring amino acid
  misc_feature (143)..(143): Xaa can be any naturally occurring amino acid
PTATASLPRMASPTTXVAVRPLGGAAAGTPRPXSVSGEQQQGGGFGECWGAVMGLSSCYGEILLFFVNGESYIGPDCCVAIRGATRYCWPAMLASVGFTGEEADVLRGFCDGEEADTRAPPPAVPAPAARGLGQLAAVAVRGX

SEQ ID NO: 470 - protein, 42 aa, Zea mays
GIGIAHTPNSPPLAVWQMENVGAPIPLDLRRSSQEPRAAAGM

SEQ ID NO: 471 - protein, 316 aa, Zea mays
MSFLFKSSNGGTTEKIPSPEEQREKINELRKELGEHSSAAIKDFLSDASLARFLRARNWNVQKASKMMKAAVKWRVAFKPENICWDDIAEEAETGKIYRADYKDKHGRTVLVLRPGLENTTSAIGQIKYLVYSLEKAIMNLTEDQEKMVWLTDFQCWTLGSTPLKVTRETVNVLQDCYPERLGLAILYNPPRIFESFWKIVKPFLDHETRKKVKFVYSNDKESQKIMAEVFDMEELDSAFGGKNPATFEYNSYAEQMQDDDKKMGSSHGSANSLLGSAGKEANGADSDASSEASFYSGTDSPTHENGEHSIAKKNG

SEQ ID NO: 472 - protein, 195 aa, Zea mays
  misc_feature (1)..(1): Xaa can be any naturally occurring amino acid
XTRPLDSAQFFHQALYLGGVTAAPARPTLRLMKQNLAFLSSVLTEQAQLPAVLEVMRASVEAFLTVVLAGGSGRAFARGDHAAVAADFASLKRLFCSFGVGEEAVERETVRAEGVLALMAVPTEQLIHELLGHYASTPMRAAGDELPQLPMMPMTPTARRWSRSDANTVLRVLCYRDDEPANRFLKKTFNLPKRR

SEQ ID NO: 473 - protein, 97 aa, Zea mays
  misc_feature (1)..(1): Xaa can be any naturally occurring amino acid
  misc_feature (97)..(97): Xaa can be any naturally occurring amino acid
XAGHSGMFYYMLRGLFHLCICIRCLSSSNMALRGVFRHSWNNIHLRSCQILYWPIVFQDASLSSTVNVEYAHKAAIRKHALWSSIIVDLLMGFVLGX

SEQ ID NO: 474 - protein, 616 aa, Zea mays
  misc_feature (1)..(1): Xaa can be any naturally occurring amino acid
  misc_feature (199)..(199): Xaa can be any naturally occurring amino acid
  misc_feature (206)..(206): Xaa can be any naturally occurring amino acid
XEVYARVWLLPEDEAAEKRALEKVRVAEAAERREGEDCGAMRPLARTPHMFCKTLTASDTSTHGGFSVPRRAAEDCFPPLDYSQQRPSQELVAKDLHGTEWKFRHIYRGQPRRHVLTTGWSAFVNRKKLISGDAVLFLRGEDGVLRLGVRRAAQLKIVTPLPAPHNKCSSNSNLGNVCTSCGPRRLFFHIYYNPRVTQXSEFIVPXYWKFTRSFNQPISVGMRCRMRYESDDASERRCTGIIIGSREADPIWYGSKWKCLVVRWDDGIECRWPNRVSPWEIELTGSVSGSQMCAPSSKRLKPCLPQVNPEIVLPNGSVSSDFAGSARFHKVLQGQELLGFKTHDGPAISASQATEARNLQYSDERSNNNLGIPRLGVRSPTGIPGFPYHCSGFGESQRFQKVLQGQEVFHPFRGGCLADGHIRTAGMYQPDGRHVSGAAYKWSAPQGYDFPQPATFFLLQESSPSSVMMFPQTRSKITHLEYEYSRHEDGRLDRTVPTQDMGRSNQTLSLWPHLVSGEAIEECTGTVNMHSPVSGAEHESNNESTVENGCKIFGISLAEKIRSCDEADSCSAKCNSRLQPLKSQMPKSLGSCWATVHEQRPVVGRVVDVSATDMMI

SEQ ID NO: 475 - protein, 119 aa, Zea mays
PNLKNGTDPLLMPFNSYMADWSSDKITYTTLNTPKISTELPVKLHHDKSSSFEAPNLKEHESVFATHEMTVEATRKEDEHTSKSSFTSYNGVPDTAAQASKPKKTRTTTAKNTEKFDWE

SEQ ID NO: 476 - protein, 376 aa, Zea mays
  misc_feature (1)..(1): Xaa can be any naturally occurring amino acid
  misc_feature (300)..(301): Xaa can be any naturally occurring amino acid
  misc_feature (334)..(334): Xaa can be any naturally occurring amino acid
XNMPQLLTEWGALSLESLKKELAEANAHRDAALREAAEVRSSLGELATKLVSVEAYCSELKKALRQATNSPSVSRRSTRSVEARRELPTPVSHEVMVEGFLQIASEARLSVKQLCKALIQQVNEESSDGLSDKLNLLLRPYQLALSSGSVSKHCSKAVLYHLEAIMNQVMFQDFENPAFQRNGSPRCLDPAEDSRQSFAAFVALRNLSWNEVLRKGTKYYSEDFSRFCDRKMSVVVATLAWSRPWPEQLLQCFFVAAKCVWLLHLLAFSFGPPLTILRVQDGRAFDELYMEDILHDRQPXXQSPCQVKIMVTPGFYVQDRVLKCRVLKTRSAAXLCLFDQQLVWCQLTRVTFFFFCLEPMVKKLEALNRMFAVDLE

SEQ ID NO: 477 - protein, 273 aa, Zea mays
LRLVRGGNLKVTFLPVINWLESHANPSLAENGIRVDLAWFQATALGYCQLGLLVYAVEGEAALTEPDGSPRVKIEQHTPITGGVLNSNSLRTLKDRRDLFYPFSHILHNSKPVGHQDLVGLVISILLLADFSLVLLTFLQLYSYSMVDVLLVLFILPLGILSPFPAGINALFSHGPRRSAGLARVYALWNITSLVNVVVAFICGFVHYKLSTKTHPSVQPWNLGTDESGWWLFPTGLMLLKCIQARLVDWHVANLEIQDRAVYSNDPNIFWQS

SEQ ID NO: 478 - protein, 129 aa, Zea mays
  misc_feature (20)..(20): Xaa can be any naturally occurring amino acid
FHFISQVHHVILALDVIDDXCEWLYLLVSGFPKTTYAQHPQEEREMAHLYERRKFPYPGDDEAVEEFVKSGGALGTTIGPRGFADANMDSENMQKQLQSKKFEQEAQKLWIRMRNEVVQELQEKGFDIE

SEQ ID NO: 479 - protein, 760 aa, Zea mays
  misc_feature (234)..(234): Xaa can be any naturally occurring amino acid
  misc_feature (251)..(252): Xaa can be any naturally occurring amino acid
  misc_feature (345)..(346): Xaa can be any naturally occurring amino acid
QLIVAAASNTMNESSAAASSYLLLTLIIHLLPFVSAHDFLSAGSSLSVEHSSDVLHSQDGTFTCGFYRISPNASTFSIWFSGSSERTVVWSANPPHPVYTWGSKVELDADGSMVLKDYNGQIVWTNNASVYAGHVQARLLGTGNLAVEGRGGAILWRSFDSPTDTLLPTQRITASTKLVSTNRLLVPGHYSFRFDDQYLLSLFDDEKNISFIYWPNPRMTIWAKGRVQFNSTMXLGLLTPWDISLASDNAXXFTAADWGPGIMRRLTLDYDGNLRLYSLNVADRTWSVTWMAFPQLCNVHGLCGENGTCVYTPVPACACAPGFEVIDPSERSKGCRPKTNISCDXXEKVDFAKLPHTDFLGYDMTAHHSVSLDFCKKECLHDCNCKGFAYWEGIGDCYPKSVLVGGVTLQNSSTGTMYIKIPNGLQVLDASIPQSQPFGPKYSPDCGTTNRYFIADFLDKLKRDHSGSKYLYFYGFLSAIFLAEVVFVGLGWFILRREYRELRGVWPAEPGYEMIANHFRRYAYRELVTATRKFKDELGRGASGIVYKGVLEDKGAVAVKKLAEINQSEEEFRHELSVISMINHMNLVRVWGYCSDGPHRILVSECFENGSLDKILFGSKGSEILLGWKQRFDIALGVARGLAYLHHECSEWVIHCDVKPENILLDENLVPKIADFGLAKLLNRGRSNLNVSKIQGTRGYLAPEWVSSLPITAKVDVYSFGVVLLELLIGARVSNMGNDEDVEAEMVLGRVSRLVKEKLQ

SEQ ID NO: 480 - protein, 819 aa, Zea mays
  misc_feature (14)..(14): Xaa can be any naturally occurring amino acid
VIQGGIGPAGLSAXDLHVLDLTQQRPRWHRVVVQGPGPGPRYGHVMALVGQRFLLTIGGNDGKRPLADVWALDTAAKPYEWRKLEPEGEGPPPCMYATASARSDGLLLLCGGRDANSVPLSSAYGLAKHRDGRWEWAMAPGVSPSPRYQHAAVFVNARLHVSGGALGGGRMVEDSSSVAVLDTAAGVWCDTKSVVTTPRTGRYSADAAGGDASVELTRRCRHAAAAVGDLIFVYGGLRGGVLLDDLLVAEDLAAAETTSAANHAAAAAASTNGQREPGRYAYNDEQSGQITVSSPDGAVVLGTPVAPPVNGDMYTDISPENAIIQGQRKMSKGVDYLVEASAAEAEAISATLAAVKARQVNGEMEHSPDREQSPDAAPSTKQNSSLIKPDVALVNNSTAPPGVRLHHRAVVVAAETGGALGGMVRQLSIDQFENEGRRVIYGTPENATAARKLLDRQMSINSVPKKVIASLLKPRGWKPPVRRQFFLDCNEIADLCDSAERIFSSEPSVLQLKAPIKIFGDLHGQFGDLMRLFDEYGAPSTAGDIAYIDYLFLGDYVDRGQHSLETISLLLALKVEYPHNVHLIRGNHEAADINALFGFRIECIERMGERDGIWTWHRVNRLFNWLPLAALIEKKIICMHGGIGRSINHIEQIENLQRPITMEAGSVVLMDLLWSDPTENDSVEGLRPNARGPGLVTFGPDRVMEFCNNNDLQLIVRAHECVMDGFERFAQGHLITLFSATNYCGTANNAGAILVLGRDLVVVPKLIHPLPPAITSPETSPEHHIEDTWMQELNANRPPTPTRGRPQAPNNDRGSLAWI

SEQ ID NO: 481 - protein, 606 aa, Zea mays
MDTHIGSVNGAASNQTVGCPASAPGCPMASTPAQPAATLSAGEASLGRHLARRLVQVGVNDVFAVPGDFNLTLLDHLIAEPGLRLVGCCNELNAGYAADGYARARGVGACAVTFTVGGLSVLNAIAGAYSENLPVICIAGGPNSNDYGTNRILHHTIGLPDFSQELRCFQTVTCHQAVVNNLDDAHEQIDTAIATALRESKPVYLSISCNLPGLPHPTFSRDPVPFFLTPRTSNKMGLEAAVEATVEFLNKAVKPVLVAGPKLRVAKAGKAFVDMVDASGYAYAVMPSAKGLVPETHPHFIGTYWGAVSTAFCAEIVESADAYLFAGPIFNDYSSVGYSFLLKKEKAIIVQPERVIVGNGPAFGCVMMKEFLSELAKRVNKNTTAYENYKRIFVPEGQPLESEPNEPLRVNVLFKHVQKMLTGDSAVIAETGDSWFNCQKLKLPEGCGYEFQMQYGSIGWSVGALLGYAQGANHKRVIAFIGDGSFQVTAQDVSTMLRCEQNSIIFLINNGGYTIEVEIHDGPYNVIKNWNYTGFVDAIHNGLGKCWTSKVKSEEELTAAIETALGEKKDCLCFIEVIAHKDDTSKELLEWGSRVSAANSRPPNPQ

SEQ ID NO: 482 - protein, 673 aa, Zea mays
METRDTDATPLPYSYTPLPAADAASAEVSGTGRTRSRRRPLCAAALVLSAALLLAVAALVGVGSRPGAVGMTESAASSPTPSRSRGPEAGVSEKTSGASDDGGRLRGAGGNAFPWSNAMLQWQRTGFHFQPQKNWMNDPNGPVYYKGWYHLFYQYNPDGAIWGNKIAWGHAVSRDLIHWRHLPLAMVPDQWYDTNGVWTGSATTLPDGRLAMLYTGSTNASVQVQCLAVPADDADPLLTNWTKYEGNPVLYPPPGIGPKDFRDPTTAWIDPSDGAWRVVIGSKDDDGHAGIAVVYRTTDLVHFELLPGLLHRVDGTGMWECIDFYPVATRGRASANGVDMSDAIASNGAVAGDVLHVMKASMDDDRHDYYALGRYDAAANAWTPIDAGRDVGIGLRYDWGKFYASKTFYDPAKRRRVLWGWVGETDSERADVSKGWASLQGIPRTVLLDTKTGSNLLQWPVEEVETLRTNSTDLSGITIDYGSVFPLNLRRATQLDIEAEFQLDRRAVMSLNEADVGYNCSTSGGAAGRGALGPFGLFVLADRRLRREQTAVYFYVAKGLDGSLATHFCQDESRSSSATDIVKRVVGSAVPVLEDEATLSLRVLVDHSIVESFAQGGRSTATSRVYPTEAIYANAGVFLFNNATAARVTATKLVVHEMDSSYNHDYMAPVADI

SEQ ID NO: 483 - protein, 152 aa, Zea mays
  misc_feature (1)..(1): Xaa can be any naturally occurring amino acid
  misc_feature (6)..(6): Xaa can be any naturally occurring amino acid
  misc_feature (25)..(26): Xaa can be any naturally occurring amino acid
  misc_feature (40)..(40): Xaa can be any naturally occurring amino acid
  misc_feature (58)..(58): Xaa can be any naturally occurring amino acid
  misc_feature (152)..(152): Xaa can be any naturally occurring amino acid
XNSEVXCDVGIEELTKNMLVNLYYXXVSSVYYFLIPVPRXELTKMAHNFYDETALPKXGKPCFSYFVRIHFVQVADFASLELSPVDGRTMTDFMHTRGLNMSSLGRVVELAEKLPHIQSICIHEMVIRSFKHIVRAVIAAVDDMQNISAGMX

SEQ ID NO: 484 - protein, 430 aa, Zea mays
  misc_feature (45)..(45): Xaa can be any naturally occurring amino acid
  misc_feature (256)..(256): Xaa can be any naturally occurring amino acid
PALDTGRPSSHFPFHAHSLTAAPAAAIPSLPSPGTASSNPLLLLXAAAAAMDSTPAHEAAPGASSSATAAAEDLAGGVAAMTLDERFALLRGIGEECIQEDELRRLLENKPVPICYDGFEPSGRMHIAQGIVKTINVNKMVRAGCKVKIWIADWFAQLNNKMGGDLKKIQTVGRYMIEIWKAAGMNLDGVEFLWSSEEINRRAHEYWPIVMDIARKNNVKRIMRCCQIMGRSDQDDLTAAQIFYPCMQCADIFFLXKADICQLGMDQRKVNVLAREYCDDIKRKNKPIILSHHMLPGFKEGQEKMSKSDPSSAIFMEDDEAQVNVKIKQAFCPPKIVEGNPCLEYIKYIVFPWFGRFEVARKESNGGNKTFTSMDELISDYETGALHPADVKPALAKAINEILQPVRDHFNNNNEAKVLLNTVKKYRVTS

SEQ ID NO: 485 - protein, 516 aa, Zea mays
MQFALALDTNSGPHQIRSCEGDGIDRLEKLSIGGRKQEKALRNRCFGGRVAATTQCILTSDACPETLHSQTQSSRKNYADANRVSAIILGGGTGSQLFPLTSTRATPAVPVGGCYRLIDIPMSNCFNSGINKIFVMSQFNSTSLNRHIHRTYLEGGINFADGSVQVLAATQMPEEPAGWFQGTADSIRKFIWVLEDYYSHKSIDNIVILSGDQLYRMNYMELVQKHVEDDADITISCAPVDESRASKNGLVKIDHTGRVLQFFEKPKGADLNSMRVETNFLSYAIDDAQKYPYLASMGIYVFKKDALLDLLKSKYIQLHDFGSEILPRAVLDHSVQACIFTGYWEDVGTIKSFFDANLALTEQPSKFDFYDPKTPFFTAPRCLPPTQLDKCKMKDAFISDGCLLRECNIEHSVIGVCSRVSSGCELKDSVMMGADTYETEEEASKLLLAGKVPVGIGRNTKIRNCIIDMNARIGKNVVITNSKGIQEADHPEEGYYIRSGIVVILKNATINDGSVI

SEQ ID NO: 486 - protein, 465 aa, Zea mays
  misc_feature (10)..(11): Xaa can be any naturally occurring amino acid
MGGAEALGQXXDGHANGAVVEEKLDLLRRQLGKADGDPLRIVGVGAGAWGSVFCALLQDAYGHLRDKAQVRIWRRPGRAVDRATAEHLFDVINAREDVLRRLIRRCAYLKYVEARLGDRTLYADEILRDGFCLNMIDTPLCPLKVVTNLQEAVWDADIVVNGLPSTDTREVFGEIRRYWKERITAPIIISLAKGIEASLDPLPRIITPTQMISNATGVPSENILYLGGPNIASEIYNKEYANARICGADKWRKPLAKFLRQPHFIVWDNSDLITHEVMGGLKNVYAIGAGMVAALTNESATSKSVYFALCTSEMIYITHLLEEEPEKLAGPLLADTYVTLLKGRNAWYGQKLAKGELTLEMGDSIKGKGTIQGVSAVDAFYELLSQDSLSVMHPEANRSVAPVEMCPILKALHRILITRDRPADSILQAIRDETMYDPRERIEMAQGHSLYRPSLLGQPKGDVKT

SEQ ID NO: 487 - protein, 394 aa, Zea mays
  misc_feature (3)..(3): Xaa can be any naturally occurring amino acid
LAXGSGDACTGKRNYTYMDAVNANLSGVKVWFCGFLQYANIVGVAIGYTIAASISMLAIQRANCFHVEGHGDPCNISSTPYMIIFGVVQIFFSQIPDFDQISWLSILAAVMSFTYSTIGLGLGIAQVVSNKGVQGSLTGISVGAVTPVDKMWRSLQAFGDIAFAYSYSLILIEIQDTIRAPPPSESKVMRRATVVSVAVTTFFYMLCGCMGYAAFGDNAPGNLLTGFGFYEPFWLLDVANAAIAVHLVGAYQVYCQPLFAFVEKWARQRWPKSRYITGEVDVPLPPGGRCYKLSLFRLTWRTAFVVATTVVSMLLPFFNDVVGLLGALGFWPLTVYFPVEMYIVQKKVPRWSTRWVCLQLLSVACLVITVASAAGSVAGIVSDLKVYKPFVTTS

SEQ ID NO: 488 - protein, 488 aa, Zea mays
MAGNALANYVQVYVMLPLDVITVDNTFEKEDETRAQLKKLTEAGADGVMIDVWWGLVEGKEPGVYDWSAYRQVFKLVQEAGLKLQAIMSCHQCGGNVGDVVNIPIPQWVRDVGKSNPDIFYTNRSGLTNIEYLTLGVDDQPLFHGRTAIQLYADYMKSFRENMADFLDAGVVVDIEVGLGPAGEMRYPSYPQSQGWVFPGVGEFICYDKYLQADFKAAAEEAGHPEWDLPDDAGTYNDTPEKTQFFADNGTYQTDKGKFFLTWYSNKLIKHGDKILDEANKVFLGCKVQLAIKVSGIHWWYNVPNHAAELTAGYYNLDDRDGYRTIAHMLTRHRASMNFTCAEMRDSEQSSEAKSAPEELVQQVLSAGWREGLNLACENALNRYDATAYNTILRNARPQGINKNGPPEHKLHGFTYLRVSDELFQEQNYTTFKTFVRRMHANLDYNPNVDPVAPLERSKAEIPIEEILEVAQPKLEPFPFDKDTDLPV

SEQ ID NO: 489 - protein, 1021 aa, Zea mays
  misc_feature (685)..(686): Xaa can be any naturally occurring amino acid
  misc_feature (729)..(730): Xaa can be any naturally occurring amino acid
  misc_feature (907)..(907): Xaa can be any naturally occurring amino acid
  misc_feature (1005)..(1005): Xaa can be any naturally occurring amino acid
  misc_feature (1019)..(1019): Xaa can be any naturally occurring amino acid
MNGMQVSDKISVDETNKGADVSKLMPEDAFFRLKSLGAGLHEKSLEELTKMAHNFYDETALPKLVADFASLELSPVDGRTMTDFMHTRGLNMSSLGSVVELARKLPHIQSICIHEMVIRSFKHIVRAVIAAVGDMQNISAAIAETLNILLGSPRLENGADTDAHIDNNLRLKWVESFLSKRFCWKLKDEFAHLRKFIILRGLCSKVGLELVARDYDMNSPNPFDKSDIVSIVPVCKHVVYSSIDGRNLLESSKMALDKGKLDDAVSYGTKALSKIIAVCGPYHRLTANAYSLLAVVLYHTGDFNQATVYQQKALDINERELGLDHPETMKSYGDLSVFYYRLQHIEMALKYVNRALYLLQFSCGLSHPNSAATYINVAMMEEGMGNVHVALRYLHEALKCNKRLLGADHIQTAASYHAIAIALSMMDAYSLSVQHEQTTMQILQEKLGEDDLRTQNNIRAHHGESVEEKENFQLVSGSPLEASKDSFQEEKLDVHPPAVLEENYAAHDEQKQCDVLSPEEYSDEGWQAASMRGRSANVRKKSSRRKPALMKLMVDHFEDGHTGSVYRTGLQPQTKGEKEDSVSAPSQLSFGSFLKTDKLNGDSSIAEDKTCHGSANQEQRTKPTVINRPTSIASKFISYKDVAVSPPGTVLKPILEKKEAKEKDSGRDIDLALSSEEEDKKFTEXXEKEKPSEDSSKEILSSQRDLESHVEIPPDSNSDEGPSAASKAXXSKLSASAPPFNPGSVLSMSQPYSTVAVYDASAILQAIPSQAMEILPSAIDTRVPRGPRSTLYYRTGHSFQRKQGYTHSQSTIVRGSYSPTTMNPHAAEFVPGKTSQQSDVADREPSPANPVANSDLDVVSQTTDEMKAETPAAEKAGQVEKVVSGKGKENRGKDIVRNSYKTELARXQILLSFIVKSVHDSLGPSRAEPERKPSGSDEASNEQTSVLGKNASGSGRKDPDKQEKATEVTKVVIKETDVFRSSCSAGYNVPLYVIYDRIIGNSRCXANPIFSGAPLCFMXCS

SEQ ID NO: 490 - protein, 442 aa, Zea mays
  misc_feature (241)..(242): Xaa can be any naturally occurring amino acid
MAGSRFGSFKSEKGDSASAAAAAGGAAQRRDPYEVLGVGRTATDQEIKSAFRRMALKYHPDKNGDDPVASDRFQEVTFSYNILSDPDKRRQYDTSGFDAIESDSQELELDLSSLNTVNTVFAALFSKLGVPIKTTVSATVLEEALNGSVMVSQLQLGNSVQRKVEKQSAHFYSVDITEKQAKMGLVCRVHSNDKSKFKLLYFELEENGGLSLALQEDSVKVGKVTAAGMYFLGFPVYRFEXXNNLAAAAKDSDGAFFKRLDSFQPCDIHELKPGTHFFAVYGDNFFKSASYTIEVVCGESFPAEKEMLRNVEAKILTKRAELSKFESEYREVLAKFTEMTSKYTQEMQAIDGLLKERNEIHASYTNNPPLKRSSSRNKAKSPSKVAKTGTEKHHQKEKKVKDHCMEGCGSDSDNSSEKKSKERFPRKKWLNLPFKLDRRKTC

SEQ ID NO: 491 - protein, 332 aa, Zea mays
  misc_feature (26)..(26): Xaa can be any naturally occurring amino acid
  misc_feature (317)..(317): Xaa can be any naturally occurring amino acid
  misc_feature (327)..(327): Xaa can be any naturally occurring amino acid
MRGRSRRRRRRRTGRRPRGTSPKSTXAATNGAGEGGVPTDRPIRVYADGIYDLFHFGHAKSLEQAKKSFPNTYLLVGCCNDELTHKFKGRTVMTEDERYESLRHCKWVDEVIPDAPWVVTEEFLDKHNIDFVAHDSLPYADASGAGNDVYEHVKKLGKFKETQRTDGISTSDIIMRIVKDYNEYVMRNLARGYTRKDLGVSYVKEKRLRVNMGLKNLRDRVKQHQEKVGEKWSTVAKLQEEWVENADRWVAGFLEKFEEGCHSMGTAIKERIQERLIKAQSSDFGSLLQYDSYDSDEAKENDEDEDEDELFEDVKEXHLRTYTMVLXLQIVL

SEQ ID NO: 492 - protein, 390 aa, Zea mays
MAARLLRYARPPARPREPRDMIDFNGNLIYFDIDDTRDPPRPPSCSSDSRPTPRQPRAQLESTRPSTTPASQSSPPPTTTTPPLAAARSRPIRPDRPAMDQYEKVEKIGEGTYGVVYKGKDRHTNETIALKKIRLEQEDEGVPSTAIREISLLKEMQHRNIVRLQDVVHNDKCIYLVFEYLDLDLKKHMDSSTDFKNHRIVKSFLYQILRGIAYCHSHRVLHRDLKPQNLLIDRRNNLLKLADFGLARAFGIPVRTFTHEVVTLWYRAPEILLGARHYSTPVDVWSVGCIFAEMVNQKALFPGDSEIDELFKIFRILGTPTKETWPGVASLPDYKSTFPKWPPVDLATVVPTLEPSGIDLLSKMLRLDPSKRITARAALEHDYFRDLEHA

SEQ ID NO: 493 - protein, 512 aa, Zea mays
MSTIAASRRSSSSSSSATAKRPAIADGPGGPKATAAQAKKRVALGNITNVAARGGRASVGGSLGNVMAPTSSAKLNPTVPLKKPSLATSARSVSSSIRGSADKPASIKPAPPVARHGSATQRHNNVPPPKVPTIADVPSRAPALVSCTGLVSPGRSGDSVSSDETMSTCDSMKSPDFEYVDNQDTSMLASLQRRTSEHLRISEDRDVEENKRKKNAVAPMEIDRICDVDSEYEDPQLCATLASDIYMHLREAETKKRPSTDFMETIQKDVNPSMRAILIDWLVEVAEEYRLVPDTLYLTVNYIDRYLSGNEISRQRLQLLGVACMLIAAKYEEICAPQVEEFCYITDNTYFRDEVLDMEASVLNYLKFEMTAPTAKCFLRRFARAAQACDEDPALHLEFLANYIAELSLLEYSLLSYPPSLIAASAIFLARFILQPTKYPWNSTLAHYTQYKPSKLSECVKALHRLCSVGSGSNLPAIREKYSQHKYKFVAKKQCPPQIPSLEFFRDATCLD

SEQ ID NO: 494 - protein, 208 aa, Zea mays
  misc_feature (114)..(114): Xaa can be any naturally occurring amino acid
MAAKMFALFALLALCATATSATHIPGHLSPLLMPLATMNPWMQYCMKQQGVANLLAWPTLMLQQLLASPLQPCQMPMMMPPMTMMPMSSMMPSMMVPTMMSPITMASMMPPMMXMPSMVSPMMIPSMMPSMMMPSMMPSMMMPSMIPPMMMPSMVSPMMMPNMMAVPQCYPDSISHIIQQQQLPFMFSPTAMAISPMFLQQPFVGAAF

SEQ ID NO: 495 - protein, 152 aa, Zea mays
  misc_feature (6)..(6): Xaa can be any naturally occurring amino acid
  misc_feature (116)..(116): Xaa can be any naturally occurring amino acid
MAAKMXLALFALLALCASATSATHIPGHLPPVMPLGTMNPCMQYCMMQQGLASLMACPSLMLQQLLALPLQTMPVMMPQMMTPNMMSPLMMPSMMSPMVLPSMMSQMMMPQCHCDXAVSQIMLQQQLPFMFNPMAMTIPPMFLQQPFVGAAF

SEQ ID NO: 496 - protein, 192 aa, Zea mays
  misc_feature (103)..(103): Xaa can be any naturally occurring amino acid
MSLCTIARRLCLSKPSSGSRLSAIWAHLYSTEAAKDMGAKKYKYPDVYDPYGPMPPPSEKVVELADRIAALPPEEIKQIAPALLLRLNQEPPQAVSGPGFRFXGAQVGSGAGSGKAEKKAEKTVFDVRLEKFDAAAKIKIIKEIRTFTDLGLKEAKELVEKAPVVLKQSLTKEEAEAIIAKIKAAGGVAVME

SEQ ID NO: 497 - protein, 317 aa, Zea mays
  misc_feature (23)..(23): Xaa can be any naturally occurring amino acid
MASAIKAASTSSRWSSSPAAVHXVRAVAAVAPAAPAAPAKLTAGAGGRCLPVSQTMSRLRAQGKTAFIPYITAGDPDLATTAEALRLLDACGADVIELGVPFSDPYADGPVIQASAARALASGTTPDGVLAMLKEVTPELSCPVVLFSYFNPIVRWGLADFAAAVKEAGVHGLIVPDLPYGNSCALTLRTEAIKNNLELVLLTTPSTPADRMEEITRASRGFVYLASVNGVTGPRANVNTRVQSLIQEVKQVTDIPVAVGFGISKPEHVKQIAEWGADGVIIGSAMVRQLGEAASPKEGLKRLEKYARSMKNALPCQ

SEQ ID NO: 498 - protein, 165 aa, Zea mays
  misc_feature (3)..(3): Xaa can be any naturally occurring amino acid
  misc_feature (139)..(139): Xaa can be any naturally occurring amino acid
TPXRAIGFLKAGRTRRPSGGKILFGGSAIESEGNFVQPTIVEITRSAPVVKEELFGPVLYVMKFQTLKEAIEINNSVPQGLSSFIFTKWPDIIFKWLGPHGSDCGIVNVNIPTNGAEIGGAFGGEKTPPGVRQTGSDSXKQYMRRLTCTINYGSELPLAQGINFG

SEQ ID NO: 499 - protein, 486 aa, Zea mays
MAGGFRVLHLVRPFLAFLPEVQSADRKIPFREKVIYTVISLFIFLVCSQLPLYGIHSTTGADPFYWMRVILASNRGTVMELGITPIVTSGMVMQLLVGSKIIEVDNSVREDRALLNGAQKLLGILIAIGEAVAYVLSGMYGSVSQLGTGNAILIILQLFFAGIIVICLDELLQKGYGLGSGISLFIATNICENIIWKAFSPTTINSGRGAEFEGAVIALFHLLITRTDKVRALREAFYRQNLPNVTNLLATVLVFLIVIYFQGFRVVLPVRSKNARGQQGSYPIKLFYTSNMPIILHSALITNLYFISQLLYRKYSGNFLVNLLGKWKESEYSGHSIPVGGLAYYVTAPSSLADVLANPFHALFYVVFMLSACALFSKTWIEVSGSSAKDVAKQLKEQQMVMPGHRESNLQKELNRYIPTAAAFGGVCIGALTVLADFMGAIGSGTGILLAVTIIYQYFETFEKERATELGFFWFLISSCGTLTWL

SEQ ID NO: 500 - protein, 395 aa, Zea mays
  misc_feature (1)..(1): Xaa can be any naturally occurring amino acid
XHASEFRVYLANLVNCDVGCSDVCSIPLPPWVLEEMSSNPNIVYTDRSGRRNPEYISLGCDTLPVLRGRTPIQVYTDYMRSFRQRFRDYLGNVIAEIQVGMGPCGELRYPSYPEANGTWRFPGIGEFQCYDKYMRASLEAAAVASGHEEWGRGGPHDAGEYKQMPDDTGFFRREGTWSTEYGHFFLEWYSGMLLEHGDRVMAAAEAVFGGTGATLSAKVAGIHWHYRTRSHAAELTAGYYNTRGHDGYAPIARMLAKRGAVLNFTCMEMKDEQQPQHASCSPELLVQQVKAATSAAGVQLAGENALERYDDAAFSQVVSTARGAGLAAFTYLRMNKTLFDGDNWGRFVSFVRAMADGGARPALPRCDTGHSDLYVGFVEERKAAEAKGAATTAAL

SEQ ID NO: 501 - protein, 205 aa, Zea mays
MGRSPCCDENGLKKGPWTQEEDEKLLHYIQKNGHGSWRTLPRLAGLNRCGKSCRLRWTNYLRPDIKRGKFSQEEEQTILHLHSVLGNKWSAIATHLPGRTDNEIKNFWNTHLKKRLIQMGFDPMTHRPRTDLFAALPQLIALAALREQLSALCSPQLTAATTAPSADDGDRQSSYLPCTFPVSSDGQEAANQQQQTGLISYDGGP

SEQ ID NO: 502 - protein, 420 aa, Zea mays
  misc_feature (62)..(62): Xaa can be any naturally occurring amino acid
  misc_feature (67)..(67): Xaa can be any naturally occurring amino acid
  misc_feature (227)..(227): Xaa can be any naturally occurring amino acid
  misc_feature (392)..(392): Xaa can be any naturally occurring amino acid
WVPRGRPGRSVGTRCRLTDSPRKSQSPLSRVQTPLLTDDGLASDGTAAAALCRRRVAPARAXAAASXVVNPTTEAHIGEIPAGTAEDVDAAVAAARAALKRNPGGAPANVACAIAKLGGSSAFVGKFGDDEFGHMLVNILKQNNVNSEGCLFDKHARTALAFVTLKHDGEREFMFYRNPSADMLLTEAELDLGLVRRARVFHYGSISLISEPCRSAHMAAMRAAKAXAGVLCSYDPNVRLPLWPSPDAAREGILSIWKEADFIKVSDDEVAFLTRGDANDEKNVLSLWFDGLKLLVVTDGDKGCRYFTKDFKGSVPGFKVDTVDTTGAGDAFVGSLLVNVAKDDSIFHNEEKLREALKFSNACGAICTTKKGAIPALPTVATAQDLIAKANXMAARPAVPPRHCPPPPRPSSSTSSVSVH

SEQ ID NO: 503 - protein, 211 aa, Zea mays
MAAKMFALFALLALCATATSATHIPGHLSPLLMPLATMNPWMQYCMKQQGVANLLAWPTLMLQQLLASPLQPCQMPMMMPGMMPPMTMMPMPNMMPSMMVPTMMSPITIASMMPPMMMPNMVSPMMMPSMMPSTMTPSMMPPIMMPSMIPPMMMPSMVSSMIMPNMMTVPQCYSDSISHIIQQQQLPFMFSPTAMAISPMFLQQPFVGAAF

SEQ ID NO: 504 - protein, 788 aa, Zea mays
  misc_feature (378)..(378): Xaa can be any naturally occurring amino acid
MSAADPSAAPAAAADPDGPDSVRLTWNTWPRSKVEASRCVVPLAATISPTRVPDPSAASPPPLPYPPLRCKPPCSALLNPFARVDFAAKIWICPLCFSRNHFPPHYAAISESNVPAELFPQCSTVDYIVGGAGIPGVGGAPPPPPPVFLFVIDTCVIEEELEYVKMAMRKAVALLPEHALVGLVTFGTQVHLHELGFSDLSKIYVFRGTKEISKDQILDQLGLAGAGRPGFPKMPQQPGGPQVNGMPTAGVNRFLLPVSDCEIALSTLLDELQPDQWPVEAGNRAIRCTGVALSVAAGLLGACMPGTGARIIALLGGPCTEGPGMIVSKDLSEPVRSHKDLDKDAAPHFQKAVKFYDGLAKQLVSQGHVLDVFASALXDQVGLAEMKVAIERTGGLVVLSESFGHSVFKDSFKRIFEGGEQSLGLSFNGIIEINCSKDIKVQGIIGPCTSLEKKGAMCSDTVVGQGNTSAWKMCGLDRNTSLTVFFDVSPSGSSQPGNQNPHLYIQFVTSYQHPEGQMRIRVTTICRKWVDGSTNTEELVEGFDQETAAVVLARYISLKMEMEEEFDATRWLDRSLIRLCSRFGDYRKDDPSSFSLHSNFSLFPQFMFNLRRSQFVQVFNNSPDETAYFRMLLNRESITNSVAMIQPSLISFSFDSPPSPVFLDVASIAADRILLLDAYFSVVIFHGMTIAQWRNMGYQNQPEHEQFAQLLQAPHEEAQMIIKGRFPVPRLVVCDQHGSQARFLLAKLNPSATYNSAHDVAPGSDIIFTDDVSFQVFCEHLQRLAVQS

SEQ ID NO: 505 - protein, 408 aa, Glycine max
MVAMAAATASTQLIFSKPCSPSRLCPFQLCVFDTKQVLSSGRRRHVGGSGVRCMAVGEAATTGTKKRSGYELQTLTNWLLKQEQAGVIDAELTIVLSSISMACKQIASLVQRANISNLTGVQGAVNVQGEDQKKLDVVSNEVFSNCLRSSGRTGIIASEEEDVPVAVEESYSGNYIVVFDPLDGSSNIDAAVSTGSIFGIYSPNDECLADIGDDPTLDTTEQRCVVNVCQPGSNLLAAGYCMYSSSIIFVLTLGNGVFVFTLDPMYGEFVLTQENLQIPRAGKIYAFNEGNYQLWDDKLKKYIDDLKDPGPSGKPYSARYIGSLVGDFHRTLLYGGIYGYPRDKKSKNGKLRLLYECAPMSFIVEQAGGKGSDGHQRILDIQPTEIHQRVPLYIGSVEEVEKVEKYLA

SEQ ID NO: 506 - protein, 801 aa, Glycine max
  misc_feature (588)..(589): Xaa can be any naturally occurring amino acid
  misc_feature (653)..(653): Xaa can be any naturally occurring amino acid
  misc_feature (660)..(660): Xaa can be any naturally occurring amino acid
  misc_feature (785)..(785): Xaa can be any naturally occurring amino acid
LEANCTTMAFSISLFLLVLLFSFQSSSSSLLSLNKGSSLSVEKHAEDVIVSPNQMFCAGFFQVGENAFSFAIWFNDPHTHNNNHTVVWMANRETPVNGRLSKLSLLNSGNMVLVGAGQITTWSSNTASDAPVKLHLQDDGNLVLLDLHGTILWQSFDTPTDTLLPGQLLTRYTQLVSGFYKMLFDDDNVLRLIYDGPDVSSTYWPPPWLLSWQAGRFNYNSSRVAVLNSIGNFTSSDNYDFSTDDHGTVMPRRLKLDSDGNARVYSRNEALKKWYVSWQFIFDACTSHGICGANSTCSYDPKRGRRCSCLPGYRVKNHSDWSYGCEPMFDLTCSRNESIFLEIQGVELYGYDHNFVQNSTYINCVNLCLQDCNCKGFQYRYDGNHCFTKSQLLNGRRSPSFNGAIYLRLPITNNFSKEESVSADDHVCSVKLRKDYVRKPENRLVRFFLCATAVGALEVIFFFLIWGFLIWNLKTSSADQQGYHLAAVGFRKYSYLELKKATKGFSQEIGRGAGGIVYKGILSDQRHVAIKRLYDAKQGEGEFLAEVSIIGRLNHMNLIEMWGYCAEGKHRLLVYEYMENGSLAQNLXXSNTLDWSKRYSIALGTARVLAYLHEECLEWILHCDIKPQNILLDASYQPKVADFGLSKLLNRNXTSTIQVXSMIRGTRGYMAPEWVLNLAITSKVDVYSYGIVLLEMITGKRTTGVQNIDGEEPYNGRLVTWVKKRSATSWLEHIIDPAIKTNYDECKMNLLATVALDCVEEDKDVRPTMSHVVEMLQSHESDPRXYHQCLMVTFLGPHNAN

SEQ ID NO: 507 - protein, 327 aa, Glycine max
MTGSADPLVISFGEMLIDFVPDTSGVSLAESCAFIKAPGGAPANVACAISKLGGNAAFVGKMGDDEFGRMLVDILRKNGVNTDGVCFDTEARTALAFVTLRKDGEREFMFYRNPSADMLLKESELNMGLIKQAKVFHYGSISLISEPCRSAHLAAMKVAREGGALLSYDPNVRLPLWPSEEAARSGIKSIWFDADFIKVSDDEVHFLTQGDPEKEDVVMTLWHDKLKMLLVTDGEKGCRYFTKNFRGRVTGFSAKVVDTTGAGDSFVGALLTAVARDPNIFHNEPKLREALTFANACGAMCTTQKGAIPALPTAAEAEKFISNSKAK

SEQ ID NO: 508 - protein, 190 aa, Glycine max
  misc_feature (182)..(182): Xaa can be any naturally occurring amino acid
  misc_feature (190)..(190): Xaa can be any naturally occurring amino acid
NIDQISASVEKVVPVLHADVEPFRVPLPASPLISPQREHPPQLPPPQITLQEDSDEEAVKEQAAKMPPKKKQKEQKEEEEHGAVFSVSGPVIVAENMIGVAMYELVRVGHENLVGEVIRIDADKATIQVYEETAGVTVGDPVFRSGQPLSVELGPGLMETIYDGIQRPSKGIADDSNSIYIXRGIDLPAX

SEQ ID NO: 509 - protein, 496 aa, Glycine max
MATSDSNMLLNYVPVYVMLPLGVVNVDNVFEDPDGLKEQLLQLRAAGVDGVMVDVWWGIIELKGPKQYDWRAYRSLFQLVQECGLTLQAIMSFHQCGGNVGDIVNIPIPQWVLDIGESNHDIFYTNRSGTRNKEYLTVGVDNEPIFHGRTAIEIYSDYMKSFRENMSDFLESGLIIDIEVGLGPAGELRYPSYPQSQGWEFPGIGEFQCYDKYLKADFKAAVARAGHPEWELPDDAGKYNDVPESTGFFKSNGTYVTEKGKFFLTWYSNKLLNHGDQILDEANKAFLGCKVKLAIKVSGIHWWYKVENHAAELTAGYYNLNDRDGYRPIARMLSRHHAILNFTCLEMRDSEQPSDAKSGPQELVQQVLSGGWREDIRVAGENALPRYDATAYNQIILNARPQGVNNNGPPKLSMFGVTYLRLSDDLLQKSNFNIFKKFVLKMHADQDYCANPQKYNHAITPLKPSAPKIPIEVLLEATKPTLPFPWLPETDMKVDG

SEQ ID NO: 510 - protein, 491 aa, Glycine max
MAGIAGTCPLGALLRNSVSENNGKISVVHYEGLRLQQRMQMPSPSQYISASSSAPRCRTIKAMASPTVGAPKREKDPKKRVVITGMGLVSVFGSDVDAFYNKLLEGESGISLIDRFDASNFSVRFGGQIRDFSSEGYIDGKNDRRLDNCWRYCIVAGKRALDDANLGKQVLDTMDKTRIGVLVGSGMGGITAFSNGVEALVQKGYKKITPFFIPYSITNMGSALLAIDTGLMGPNYSISTACATANYCFCAAANHIRKGEADIMVVGGTEAAIMPSGLGGFIACRALSHRNEDPKKASRPWDKDRDGFVMGEGSGVLVMESLESATKRGAKIIAEYLGGAITCDAHHMTDPRADGLGVSSCISKSLEDAGVSPEEVNYVNAHATSTLAGDLAEVNAIKKVFKDTSELKMNATKSMIGHGLGAAGGLEAIATIKAITTGWLHPSINLDNLEASVTIDTVPNVKKKHEVNVGISNSFGFGGHNSVVVFAPFRP

SEQ ID NO: 511 - protein, 158 aa, Glycine max
  misc_feature (100)..(100): Xaa can be any naturally occurring amino acid
  misc_feature (158)..(158): Xaa can be any naturally occurring amino acid
TLIQMISRRALKRRTVVEGLTNRQWVLDIHGGLSVTVLVEYLQLWNLVDGIVLQPDIADQHIWRLSAHGTYCSKSAYDALFTGSIPFGPWRRVWKTWASXRCKFFVWLAIKNRVWTADRLAKRGLPHPVACPLCDQAEETIQHIPVSCVFARQIGRVX

SEQ ID NO: 512 - protein, 105 aa, Glycine max
  misc_feature (93)..(93): Xaa can be any naturally occurring amino acid
PRVLFNEDLVVVHDALEFGHCRLSLAVPKEGIFENIHTMEDLLKMSEWTEERPLRVVTGFGYLGDKFLREKGFKHVSFLSADGALESYPPVSXASSSFVFLSVSL

SEQ ID NO: 513 - protein, 608 aa, Glycine max
MDTKIGSLDAPKPNSNDVVSCNLTSSAAIQPCLPATVINGAGCSDSTLGGHLARRLVEIGVTDVFSVPGDFNLTLLDHLIAEPALHLVGCCNELNAGYAADGYARARGVGACVVTFTVGGLSVLNAIAGAYSENLPLICIVGGPNSNDYGTSRILHHTIGLPDFSQELRCFQTITCFQAVVNNLEDAHELIDTAISTALKESKPVYISISCNLPGIPHPTFSRDPVRFSLSPRLSNKMGLEAAVEAAAEFLNKAVKPVLVGGPKLRVATASDAFVELADACGYALAVMPSAKGQVPEHHPHFIGTYWGAVSTAFCAEIVESADAYLFAGPIFNDYSSVGYSLLLKKEKAIIVQPDRVVIANGPAFGCVLMKDFLKALAKRLKHNNTAYENYHRIFVPDGHPLKAAPREPLRVNVLFQHIQNMLSGETAVIAETGDSWFNCQKLKLPKACGYEFQMQYGSIGWSVGATLGYAQAVPEKRVIACIGDGSFQVTAQDVSTMLRCGQKTIIFLINNGGYTIEVEIHDGPYNVIKNWNYTGLIDAIHNGEGKCWTAKVFCEEELVEAIATATGPKKDSLCFIEVIVHKDDTSKELLEWGSRVSAANSRPPNPQ

SEQ ID NO: 514 - protein, 308 aa, Glycine max
  misc_feature (1)..(1): Xaa can be any naturally occurring amino acid
XRFRDYLGSVIIEIQVGMGPCGELRYPSYPESNGTWRFPGIGEFQCYDKYMRASLEASTEAIGKKEWGKNGPHDSGQYNQFPEDTGFFKREGTWNTEYGQFFLDWYSTKLVEHGEKILVSAKGIFNSCGVKLSAKVAGIHWHYKTRSHAAELTAGYYNTRFRDGYLPIAQMVAKHGVVLNFTCMEMRDREQHEHCSPEGLVHQVKMAARTAGAELAGENALERYDAGAFSQVLSTSNSGSGLAAFTYLRMNRRLFEGDNWRHFVEFVKCMSEGGKRQRLPQSDSCGTHLYVGHITEKQQEQAQEVALV

SEQ ID NO: 515 - protein, 205 aa, Glycine max
  misc_feature (205)..(205): Xaa can be any naturally occurring amino acid
MMRTPISSDESGLKKGPWSPEEDKILVDFIEKHGHGSWRALPRLAGLNRCGKSCRLRWTNYLRPDIKRGKFSDEEEQLIINLHSVLGNKWAAIASHLPGRTDNEIKNLWNTHLKKKLMQMGLDPVTHRPRTHHLNLLSNLQQILALIRFANKLQLLQNIFEASNSDPLPDSSYSLLNDVLGGLNNLHSNDLHNLYDNAVCRLSFX

SEQ ID NO: 516 - protein, 757 aa, Glycine max
MWKLKFAEGGNPWLRTLNNHVGRQVWEFDPKLGSPQDLLEIEKARQNFHDNRFTHKHSADLLMRMQFARENPTREVLPKVGVKDIEDVTQEIVTKTLRRAVSFHSTLQCHDGHWPGDYGGPMFLMPGLVITLSITGALNTVLTEEHRKEICRYLYNHQNKDGGWGLHIEGPSTMFGSVLSYITLRLLGEGPNDGQGEMEKARDWILGHGGATYITSWGKMWLSVLGVYEWSGNNPLPPEIWLLPYMLPFHPGRMWCHCRMVYLPMSYLYGKRFVGPISPTVLSLRKELYTVPYHDIDWDQARNLCAKEDLYYPHPLVQDILWASLHKFLEPILMHWPGKRLREKAIISALEHIHYEDENTRYICIGPVNKVLNMLCCWVEDPNSEAFKLHLPRIYDYLWIAEDGMKMQGYNGSQLWDTAFAVQAIIASNLIEEFGPTIRKAHTYIKNSQVLEDCPGDLNKWYRHISKGAWPFSTGDHGWPISDCTAEGLKAVLLLSKIAPEIVGEPIDVKRLYDSVNVILSLQNEDGGFATYELKRSYNWLEIINPAETFGDIVIDYPYVECTSAAIQALASFRKLYPGHRREEIQHCIDKATTFIEKIQASDGSWYGSWGVCFTYGAWFGVKGLIAAGRSFSNCSSIRKACEFLLSKQLPSGGWGESYLSCQNKVYSNLEGNRSHVVNTGWAMLALIDAGQAKRDSQPLHRAAAYLINSQLEDGDFPQQEIMGVFNKNCMITYAAYRNIFPIWALGEYQSQVLQSR

SEQ ID NO: 517 - protein, 148 aa, Glycine max
  misc_feature (1)..(1): Xaa can be any naturally occurring amino acid
XLISYLTKSAGTGIGIEFRESGLNINAKNEQLVKEGMVFNVSLGFQNVQRESSKSKNKHFSLLLADTVIINKDKTEVVTSMSSKALKDVAYSFNEDEEEENPRAKADTNGAEPLMSKTTLRSDNHEMSKEELRRQHQAELARQKNEET

SEQ ID NO: 518 - protein, 198 aa, Glycine max
  misc_feature (1)..(1): Xaa can be any naturally occurring amino acid
  misc_feature (159)..(159): Xaa can be any naturally occurring amino acid
XARDAILYECVQTIMSVEDNGGLRVLAINILGRFLSHKDNNIRYVGLNMLMKAVTVDAQAVQRHRATILEWLKDSDASIQKRALELVCILVNETNVNALTKELVEYLEVSDPDFRADLTAKICSIVSKFSPEKIWYIDQMLNVLSEAGNFVKDEVWHAXIVVISNASELHGYTVRALYKAFKMAGEQETLVRLTVWGI

SEQ ID NO: 519 - protein, 129 aa, Glycine max
  misc_feature (109)..(109): Xaa can be any naturally occurring amino acid
  misc_feature (122)..(122): Xaa can be any naturally occurring amino acid
MSGGAGSIVWFCRDLRIEDNPALAAGVRAAAVVAVVVWAPEEEGQYYPGRVSRWWLKNSLAHLHSSLRNLGTPLITKRSTDTLSSLLEVVKSTGATQLFFNHLYDALIXVSFLFPTTTFNIXFATFCFL

SEQ ID NO: 520 - protein, 287 aa, Glycine max
  misc_feature (8)..(8): Xaa can be any naturally occurring amino acid
  misc_feature (65)..(66): Xaa can be any naturally occurring amino acid
  misc_feature (71)..(71): Xaa can be any naturally occurring amino acid
  misc_feature (102)..(103): Xaa can be any naturally occurring amino acid
MAIAIETXPQQHKISRFGSAAEQRRWTLNDFDIEKPLGRGKFGHVYLAREKTSNHIVALKVLFKXXLQQSXVVHQLRREVEIQSHLRHPHILRLDGYFYDQXXGPKGDLYKELQKCKYFSERRVTTYVASLARAFIYCHGKHVIHRDIKPENLLIGSQNQNFVLCFGWSVHTFNRRRTMCGTLDYLPPEMVESVEHDASVDIWSLGVLCYEFLYGVPPFEAKEHSDTYRRIIQVDLKFPPKPIVSSAAKDLISQMLVKDSSQRLPLHKLLEHPWIVQNAEPSGVYRS

SEQ ID NO: 521 - protein, 494 aa, Glycine max
  misc_feature (1)..(1): Xaa can be any naturally occurring amino acid
  misc_feature (493)..(493): Xaa can be any naturally occurring amino acid
XFFFFFFFSENTFSTDAFIGVNIGSDISDMPGPTEIVALLKAQSIQHVRLYDADQALLLALANTGIRVTVSVPNDQLLGIGQSNATAANWVTRNVIAHVPATNITAICVGSEVLTTLPNAAPILVSAINFIHSALVAANLDRQIKVSSPHSSSIILDSFPPSQAFFNRTWNPVMVPMFKFLQSTGSCLMLNVYPYYDYQQSNGVIPLDYALFRPLPPNKEAVDSNTLLHYTNVFDAVVDAAYFAMSDLNFTNIPIMVTESGWPSKGDSSEPDATVDNANTYNSNLIRHVLNNTGTPKHPGIAVSTFIYELYNEDLRSGPVSEKNWGLFYANGEPVYTLHLTGAGILFANDTTNQTFCVTKSNADPKMLQAALDWACGPGKVDCSPLLQGQPCYEPDNVVAHSTYAFNAYYQKMDKSPGSCDFKGVATVTTTDPSHGSCIFPGSRIPRKGPRTNGTSLAPSNSTSSGCLSQYHDNGGFFTSSLILVLLLCAVVXN

SEQ ID NO: 522 - protein, 164 aa, Glycine max
  misc_feature (100)..(100): Xaa can be any naturally occurring amino acid
  misc_feature (145)..(145): Xaa can be any naturally occurring amino acid
  misc_feature (158)..(158): Xaa can be any naturally occurring amino acid
MPRKRFQESQPKTGTIRLQHTQDFLRKIGLGKENYYFWKQIGKALLCTYAVIGAVWVYNETSPLGWWTLKPKPKEELELAHLYERRQFPYPGDEEAMQCXEFIARGGMIGTTIGPKGVVEGDKDESDYKKELKDKKFGQEAQKLXMRMRSEVTAEIQXKGFDVE

SEQ ID NO: 523 - protein, 267 aa, Glycine max
  misc_feature (9)..(9): Xaa can be any naturally occurring amino acid
RSGIPAVDXTRPGFSYLFAAKSNEELTSIKRAAYLTTSVMKNFVVTKLENVIDEEKKISHSTLMEETEKVILEPSKVNCKLKADNVDICYPPIFQSGGEFDLKPSAVSNDELLHYDSASVIICAVGARYKSYCSNIARTFLIDADPLQSRAYEVLLKAHEAVIGSMKPGNKLSVAYQAAVSVVERDAPDLISYLTKSAGTGIGIEFRESGLNLNAKNEQIIREGMVFNVSLGVQKLQCENSKSKNKQFSLLLADTVIITKDKTEIVT

SEQ ID NO: 524 - protein, 548 aa, Glycine max
  misc_feature (420)..(420): Xaa can be any naturally occurring amino acid
  misc_feature (427)..(427): Xaa can be any naturally occurring amino acid
  misc_feature (434)..(434): Xaa can be any naturally occurring amino acid
  misc_feature (545)..(545): Xaa can be any naturally occurring amino acid
SDTDECGNLPGLIEKDLFQTQMVGQLSPSITLLTSLEILDLGGLVGLTGLARETIGLQMPNLQKLYLYGNNLTGPVPESIGDLPRLQELALHENKISGSIPSTIGSLKKLKSLLLYSNQISGTIPFSLGNLTNLVELDVHDNAIMGQVPNSIGQMQALEKLDLSSNMLSGSIPSSLTNLTAISVLYMDTNYLEGTIPFPSRSGEMPSLGFLRLHNNHLSGNIPPSFGYLVSLKRVSLSNNKIEGALPSSLGNLHSLTELYLSDNSFSGQIPKSIGQLSQLIMLNISSNLIEWPLPQEISSLQNLQTLDLSFNPLNLSSIPPWLTSISSLSRISLAGCGIKGQIPDSLQTTQSLQELDLSGNLLSGSIPSWIGSLSQLYLLNLSSNSLDSHIPESLTNLPDLGVLDLHSNKLTGSIAGVFXTLNKVHXHTLIFLXNNFSSGVEAIGVGEQLNIQYLNLSHNLLKGTLPSSLGKLNSIHSLDLSFNELASNLPEMLAKLTLLERLKLQGNHFSGKIPSGFLKLKKLKELDLSDNVLEGEIPEVVTTXVSL

SEQ ID NO: 525 - protein, 396 aa, Glycine max
  misc_feature (21)..(21): Xaa can be any naturally occurring amino acid
  misc_feature (102)..(102): Xaa can be any naturally occurring amino acid
  misc_feature (176)..(177): Xaa can be any naturally occurring amino acid
  misc_feature (204)..(205): Xaa can be any naturally occurring amino acid
  misc_feature (339)..(340): Xaa can be any naturally occurring amino acid
VSFLLAKSLSFGVWNSTSSEXRSYEGQSDRAQVEDLERRYEVVPLESVSLFTDTMADPICRIRNSPMYMLLSAELDTESVGDIQGTIKVDTVPVHPLKDLSXLGYVLGLMVSPQHRRKGIGSSLVRTLEEWFTSKDVDYAYMATEKDNHASVSLFMDKFGYTKFRTPAILVNPVNXXHCFQISPNIEIARLKIDQAEYLYRRFXXGSTEFFPNDIGNILRNKLSLGTWVAYFKDGQVPNSWAMLSVWNSGEIFKLRLGKAPFSCLVCTKSWWLIHKIFPCLKLPTIPDFFNPFGFYFMYGVHHEGPFSGKLVRALCQFVHNMGAAKDESNCRIIVTEVXXGRDELNHHIPHWKLLSCPEDLWCIKALKNEGTNNKFHELTTKTPPTRALFVDPREV

SEQ ID NO: 526 - protein, 210 aa, Glycine max
  misc_feature (1)..(2): Xaa can be any naturally occurring amino acid
XXSSSRSSRATLYVLTLTLPSASAVYWAFGDQLLTHSNALSLLPKTGFRDTAVILMLIHQFITFGFACTPLYFVWEKFIGVHETKSLFKRALARLPVVIPIWFLAIIFPFFGPINSTVGSLLVSFTVYIIPALAHMVTFASAPARENAVERPPSKLGGWVGLYSMNVFVVVWVLVVGFGLGGWASMINFIHQIDTFGLFVKCYQCPPHKA

SEQ ID NO: 527 - protein, 189 aa, Glycine max
  misc_feature (1)..(1): Xaa can be any naturally occurring amino acid
XSEAFRTLLMWLCRYKHVEDAEALFHNSVKKGLRADIKMWNVILNGWCVLGNSHEAKRVWRDIVASPCKPDIFTYATFIKALTKKGKLGTALKLFRGMWDKGGKPDVVICNCIIDALCFKKRIPEALEIFCDMSERGCEPNVATYNSLIKYMCKIQRMEKVYELVDEMERKKGSCLPNAVTYCYLLKSL

SEQ ID NO: 528 - protein, 80 aa, Glycine max
  misc_feature (1)..(1): Xaa can be any naturally occurring amino acid
  misc_feature (80)..(80): Xaa can be any naturally occurring amino acid
XSTMTPSMMPPIMMPSMIPPTMMQSMVSSMIMPNMMTVPQCYSDSISHIIQQQQLPFMFSRTLVAISPMFLQQPFVGAAX

SEQ ID NO: 529 - protein, 178 aa, Glycine max
  misc_feature (1)..(1): Xaa can be any naturally occurring amino acid
XRKDLTALLEQDIFHQSLIACCLEIVLFAYSSPKTFPWTIEVLKLSAFYFYKVIEVFIRSEDGLSRDMVKHLNTIEEQILESRAWTSDSVLWVHLDAVDDVPTCEEVIIPSNFETGNEALVGHLPMIPASPIVHPRVKDLGGSHRRDCQPLSPISVHDRYSSPAAGSAKRRLFGDDCP

SEQ ID NO: 530 - protein, 250 aa, Glycine max
  misc_feature (1)..(1): Xaa can be any naturally occurring amino acid
  misc_feature (24)..(25): Xaa can be any naturally occurring amino acid
  misc_feature (68)..(69): Xaa can be any naturally occurring amino acid
  misc_feature (120)..(130): Xaa can be any naturally occurring amino acid
  misc_feature (174)..(175): Xaa can be any naturally occurring amino acid
  misc_feature (206)..(206): Xaa can be any naturally occurring amino acid
  misc_feature (242)..(242): Xaa can be any naturally occurring amino acid
  misc_feature (244)..(244): Xaa can be any naturally occurring amino acid
XYSLIILIRMVVLILFLAWRVKHXXTDAIWLWGMSVVCEIWFAFSWLLDQLPKLCPINRSTDLNVLRXXLEMPSPTNPTGKSDLPGIDVFVSTADPEKEPPLVTANTILSILAADYPVEXXXXXXXXXXXALLTFEAMAEAASFANVWVPFCRKHNIEPRNPESYFNLKRDPYXXKVKPDFVKDRRRVKREYDEFKVRINGLPDSXRRRSDAFHAREEIKAMKLQRQHNEDELVQPVKIPKXTXMADDAH

SEQ ID NO: 531 - protein, 132 aa, Glycine max
  misc_feature (1)..(1): Xaa can be any naturally occurring amino acid
  misc_feature (65)..(66): Xaa can be any naturally occurring amino acid
  misc_feature (132)..(132): Xaa can be any naturally occurring amino acid
XAEAYLGKSISKAVITVPAYFNDAQRQATKDAGRIAGLDVQRIINEPTAAALSYGMNKKEGLIAXXDLGGGTFDVSILEISNGVCEVKATNGDTFLGGEDFDNALLDFLVNEFKRTESIDLAKDRLALQACX

SEQ ID NO: 532 - protein, 200 aa, Glycine max
  misc_feature (1)..(1): Xaa can be any naturally occurring amino acid
XTRPIYTFISMWFVGGLTAFHLYLISTNQTTYENFRYRYDRRANPYNTGVFNNFLEIFCTSIPQSKNNFRAKVPMEPVLPARSVGGGFMSPSMGKAVDDIEMGRKTVWADMGTALDPSEGQLNDRVAVKDGEFGELSPEIRTTVDETSHRAGMHPRRSSWGRKSGSWEMSPEVLALAAKVGESNRMGGGSSSLTTENRHT

SEQ ID NO: 533 - protein, 74 aa, Glycine max
  misc_feature (1)..(1): Xaa can be any naturally occurring amino acid
XQMMTPNMMSPLTMPSILSPMVLPSMMSQMMMTQCHCDAVSQIMLQQQLPFMFNPMAMTIPPMFLQQPFVGAAF

SEQ ID NO: 534 - protein, 268 aa, Glycine max
  misc_feature (1)..(1): Xaa can be any naturally occurring amino acid
  misc_feature (22)..(22): Xaa can be any naturally occurring amino acid
XCYDKYMKASLAAAAEDIGKKXWGGGGPHDSGQYNQFPEDTGFFKREGTWNTEYGQFFLEWYSGKLLEHGERILVSAKGIFQTTGVKLSGKVAGIHWHYRARSHAAELTAGYYNTRHNDGYLPIARMLAKHGVVFNFTCMEMKDREQPDFAYCSPEGLVHQVKMATTTARAELAGENALERYDADAYAQVLSTSKSESGSGLAAFTYLRMNKRLFEGDNWRHLVDFVRNMSEGGRRERLPAADSHGSDLYVGHIKATREKHTQEAALV

SEQ ID NO: 535 - protein, 98 aa, Glycine max
  misc_feature (1)..(1): Xaa can be any naturally occurring amino acid
  misc_feature (98)..(98): Xaa can be any naturally occurring amino acid
XAEFGNLYNLEALIVHSLEFLLMITSQPPKFEFYDPKTPFFTSPRFLPPTKVEKCKIVDAIISHGCFLRECSIQHSIVGVRSRLESGVELQFCVYMTX

SEQ ID NO: 536 - protein, 298 aa, Glycine max
  misc_feature (4)..(4): Xaa can be any naturally occurring amino acid
  misc_feature (8)..(8): Xaa can be any naturally occurring amino acid
  misc_feature (185)..(185): Xaa can be any naturally occurring amino acid
  misc_feature (192)..(192): Xaa can be any naturally occurring amino acid
  misc_feature (206)..(206): Xaa can be any naturally occurring amino acid
  misc_feature (290)..(294): Xaa can be any naturally occurring amino acid
  misc_feature (298)..(298): Xaa can be any naturally occurring amino acid
MAQXHTSXPLLDVSHHKENSRPSPRASGKILDLEEAKHQLLFSLPMFLTNLFYYLIVLVSVIFAGHLGDLQLAGATLANSWFSVTGLAVMVGWSGALETLCGQGFGAEEYQMLGIYLQASCIISLICSIIISIIWVYTEPILVVLHQSQDIARTTSLYTNVLIPGLCALSFLQNISRFLPTQSVXVKSLVVXFSALPLLGHIFIAXALIFCTDLSFIGAPVAVSISLWISIPLLVMYIMYAERFRQTWTGFSFESFNYIFTDLKLALLSAAMVCILFTLFIILIFNDYTXXXXXKKAX

SEQ ID NO: 537 - protein, 297 aa, Glycine max
MGHSIPREKDVEFDLESGGNSSEDDVGNDLYVSDRESKGAFGLAWNGILNVDGSDKGKSGIESCSNSAKSGDFGVMDENNLELFVDKGFVQHQLSHVNVNHAKQKTKPFIPKKPPKPPLPPRGPSLDAVDQKFVKELEELALRKRARVKKMKAVRKMKASKSSSSSTYTSLSAMVITVFFFLVIILHGIKSANSAAVGLMASPEAAIAGDEGLISIQYPMNFNRNEGDAPGSHYTFRQRLVYGNFEGSFPFNVRLGYSFNCLDYVCFFVQSLGILAICQVCLYSDLIGNVNKKRVLL

SEQ ID NO: 538 - protein, 455 aa, Glycine max
  misc_feature (55)..(56): Xaa can be any naturally occurring amino acid
  misc_feature (234)..(234): Xaa can be any naturally occurring amino acid
MLQLAHVISSTRAEAGMRKLSLGSFSMANFILVIILYFSFFTFAEAEALHSQLKXXQIQDQEKLPFVGVNIGTDVSNLPSASDLVAFLQLQKITHVRIYDANSDILKTLSGTKIRVIISVPNNQLLAIGSSNSTAASWIDRNVVAYYPQTLISGISVGDEVLTTVPSSAPLILPAVESLYNALVAFNLHQHIKVSTPHAASIILDPFPPSQAYFNQSLVSVILPLLQFLSRTGXSPLTMNLYPYYVFMQNKGVVPLDNALFKPLTPNKEMVDPNTLLHYTNVLDAMVDAAYFSVKNLNITDVAVLVTETGWPAKGDSKEPYATKDNADTYNSNLIRHVFDRTGTPLHPETTSSVFIYELFNEDLRAPPVSEANWGLFYGNTSPAYLLHVSGIGTFLANDTTNQTYCIAMDGFDSKTLQAALDWACGPGRANCSEIQPGETCFQPNNVKNPASYAF

SEQ ID NO: 539 - protein, 86 aa, Glycine max
CMPAVVEGVIALMGQSSEQLIEDFSIMSCESSGIGLMSNGHTLPMPPTTGKWHRSDPNTILRVLCYRNDHAANLFLKRTFQLAKRR

SEQ ID NO: 540 - protein, 195 aa, Glycine max
  misc_feature (132)..(132): Xaa can be any naturally occurring amino acid
MSLKIAAEIYPKSPSETVKEPLVVVKEYDEDRHKVAVERLERLCEVGQSGKPSLVTDLMGDPICRIRHFQLHVMLVAEYGEEGEVVGVIRGCVKTVTRGNSVYIKLAYILGLRVSPRHRRFGIGTKLVEHLXEWCKQKGSKYAYMATDCTNEPSVNLFTRKCGYSKFRTLTILVQPVHAHYKPISSNVAVLRLPP

SEQ ID NO: 541 - protein, 153 aa, Glycine max
  misc_feature (1)..(1): Xaa can be any naturally occurring amino acid
  misc_feature (149)..(149): Xaa can be any naturally occurring amino acid
  misc_feature (153)..(153): Xaa can be any naturally occurring amino acid
XNEALRINVLFRHIQNMLSSHTTVIAEAGDTWFTCQKLKLPQGCGYEFQMQYGSIGWSVGATLGYAQAAPHKRVIACIGDGSFQMTVQEVSTMLRCEQNGIIFLINNGGYTTEVEIHDGPYNVIKNWDYAGLVERLDNGESKCWTAKVXCEEX

SEQ ID NO: 542 - protein, 1045 aa, Glycine max
  misc_feature (14)..(14): Xaa can be any naturally occurring amino acid
  misc_feature (16)..(16): Xaa can be any naturally occurring amino acid
  misc_feature (40)..(40): Xaa can be any naturally occurring amino acid
  misc_feature (1014)..(1014): Xaa can be any naturally occurring amino acid
RNSSSDLTKLLESXGXSNGCRFLDGAGDRSRSRRTEPRRXDDPAPDAAEGEQLGEPPSSGGGSPEQTQPAPASAPQSPVVGPRLAPSYTVVNAILEKKEDGPGPRCGHTLTAVAAVGEEGTPGYIGPRLILFGGATALEGNSAATGTPSSAGNAGIRLACATADVHWYDVLTNKWARITPIGEPPTPRAAHVATAVGTMVVIQGGIGPAGLSAEDLHVLDLTQQRPRWHRVGVPGPGPGPRYGHVMALVGQRYLMAIGGNDGKRPLADVWALDTAAKPYEWRKLEPEGEGPPPCMYATASARSDGLLLLCGGRDANSVPLSSAYGLAKHRDGRWEWAIAPGVSPSPRYQHAAVFVNARLHVSGGALGGGRMVEDSSSVAVLDTAAGVWCDTKSVVTSPRTGRYSADAAGGDAAVELTRRCRHAAAAIGDLIFIYGGLRGGVLLDDLLVAEDLAAAETTAASHAAAAAAASNVQAGRLPGRYGFIDDRTRQTMPETDPDGSVVLGNPVAPPVNGDMYTDISTENALLPGSRRTSKGVEYLVEASAAEAEAISATLAAAKARQVNGEVELPDRDRGAEATPSGKQISSLIKPDSAGSNSIPPGGVRLHHRAVVVAAETGGALGGMVRQLSIDQFENEGRRVSYGTPESTTAARKLLDRQMSINSVPKKVVAHLLKPRGWKPPVRRQFFLDCNEIADLCDSAERIFSSEPSVLQLRAPIKIFGDLHGQFGDLMRLFDEYGAPSTAGDIAYIDYLFLGDYVDRGQHSLETITLLLALKVEYPNNVHLIRGNHEAADINALFGFRIECIERMGERDGIWTWHRINRLFNWLPLAALIEKKIICMHGGIGRSINHVEQIENIQRPITMEAGSIVLMDLLWSDPTENDSVEGLRPNARGPGLVTFGPDRVMEFCNNNDLQLIVRAHECVMDGFERFAQGHLITLFSATNYCGTANNAGAILVLGRDLVVVPKLIHPLPPAISSPETSPERHIEDTWMQELNANRPPTPTRGRPQVTNDRAXCRLQGIRAYPLKASRIKLLFVPVLIAQSSGL

SEQ ID NO: 543 - protein, 165 aa, Glycine max
  misc_feature (1)..(1): Xaa can be any naturally occurring amino acid
  misc_feature (11)..(11): Xaa can be any naturally occurring amino acid
  misc_feature (134)..(134): Xaa can be any naturally occurring amino acid
XDRQYALAEIXSILTVVCETHSLPLAQTWVPCKHRSVLAHGGGHKKSCSSFDGCCMGQVCMSITEVAFYVIDAHTWGFHEACVEHHLQQGQGVAGRAFLSHNMCFCGNIAQFCKTEYPLVHYALMFGLTSCFAXCLQSSHTGKDDYVLEFFLPPGITDFNEQIDC

SEQ ID NO: 544 - protein, 230 aa, Glycine max
  misc_feature (1)..(1): Xaa can be any naturally occurring amino acid
  misc_feature (171)..(172): Xaa can be any naturally occurring amino acid
XSARGAIREPRVVVQTTSEVDILDDGYRWRKYGQKVVKGNPNPRSYYKCTNAGCTVRKHVERASHDLKSVITTYEGKHNHDVPAARASSHVNANASNAVPGQASLQTHVHRPEPSEVHNGIGRLERPSLGSFNLPGRQQLGPSHGFSFGMNQSMLSNLVMSGLGHAQAKLXXVMPVHSFLAQQRAANDLGFMLPKGEPNVEAIPDGGLNLSNGSSVYQEIMSRMPLGPHM

SEQ ID NO: 545 - protein, 128 aa, Glycine max
MDFSKLPKIRDEERESQFGYVHGVSGPVVTASSMAGAAMYELVRVGHSELVGEIIRLEGDMATIQVYEETSGVCVGDPVLRTGKPLSVELGPGIMGSIFDGIQRPLKDISDTTQSIYIPRGINVSALS

SEQ ID NO: 546 - protein, 144 aa, Glycine max
  misc_feature (127)..(127): Xaa can be any naturally occurring amino acid
MSGGGCSSIVWFRRDLRIEDNPALTAGVRAGAVVAVFIWAPEEEGQYYPGRVSRWWLKNSLAHLDSSLRNLGTPLITKRSTDTLSSLFEVVKSTGATQLFFNHLYDPLSLVRDHRAKEVLTAQGITXVRSFNADLLYEPWDVND

SEQ ID NO: 547 - protein, 323 aa, Glycine max
  misc_feature (1)..(1): Xaa can be any naturally occurring amino acid
XANALNVNSLRMLLHRSSTPQSSNAIQRIQSSDIEYSHFTRSLVRKVLEESLLKLKEETTRHSKSIRWELGACWVQHLQNQATGKTEPKKAEEGKVEPAVKGLGKQGGLLKELKKKIDIRNSKAEVGKDISPCNGNDINKPEATKQELERQDEEKATIWKKLLSDAAYTRLKESKTDLHLKSPDELMEMAHKYYVETALPKLVADFGSLELSPVDGRTLTDFMHTRGLQMSSLGRVVELADKLPHVQSLCIHEMVVRAYKHILQAVVAAVDNVSELASSIASCLNILLGTPSPETNDEDITSCEELKWRWVENFLLKRFGWQW

SEQ ID NO: 548 - protein, 226 aa, Glycine max
  misc_feature (1)..(1): Xaa can be any naturally occurring amino acid
  misc_feature (10)..(11): Xaa can be any naturally occurring amino acid
XLSQLYLGSXXMPGKIPIELGNLISLALLNMAYNYFEGKIPIEIGSLQKLQYFYVAKNNLTGEVPPSIGNLSSLIELSVGLNNLEGKIPQEVCSLKNLSLMSVPVNKLSGTIPSEVFSLSSLTNLLDLSQNSLSGSLPNVVSKLKNLEKMDVSENHLSGDIPGSIGDCTSLEYLYLQGNSFHGIIPTTMASLKGLRRLDMSRNHLSGSIPKGLQNISFLAYFNASF

SEQ ID NO: 549 - protein, 383 aa, Glycine max
  misc_feature (23)..(24): Xaa can be any naturally occurring amino acid
  misc_feature (333)..(333): Xaa can be any naturally occurring amino acid
MANSMSFFLLLSFLAFAPLCLCXXYNQEGYLYPQFYDYSCPQAQHIVKSVLAKYVAEQPRLAASILRLHFHDCFVKGCDASLLLDSSESINSEKGSNPNRNSARGFEVIDAIKAELERQCPSTVSCADILTLAARDSVVLTGGPNWEVPLGRRDSLGASISGSNNNIPAPNNTFQTILTKFKLQGLDLVDLVALSGGHTIGNARCTTFRQRLYNQSGNGEPDSTLDQYYASTLRTRCPSSGGDQNLFFLDYATPYKFDNSYFKNLLAYKGLLSSDQVLFTMNQESAELVKLYAERNDIFFEHFAKSMIKMGNISPLTNSRGEIRENCRRINAXRSNNHCHINISYTKSCDHILFMFLLFVPKIIKAEFIMKPLPLARVSSGGV

SEQ ID NO: 550 - protein, 298 aa, Glycine max
  misc_feature (130)..(130): Xaa can be any naturally occurring amino acid
  misc_feature (135)..(135): Xaa can be any naturally occurring amino acid
MAIATETQPQQHKDSSEVSAAAEQRRWTLNDFDIGKPLGRGKFGHVYLAREKTSNHIVALKVLFKSQLQQSQVVHQLRREVEIQSHLRHPHIWRLYGYFYDQKRVYLILEYAPKGELYKELQKCKYFSRXERRAXATYVASLARALIYCHGKHVIHRDIKPENLLIGAQGELKIADFGWSVHTFNRRRTMCGTLDYLPPEMVESVEHDASVDIWSLGVLCYEFLYGVPPFEAKEHSDTYRRIIQVDLKFPPKPIVSSAAKDLISQMLVKDSSQRLPLHKLLEHPWIVQNAEPSGVYRS

SEQ ID NO: 551 - protein, 443 aa, Glycine max
  misc_feature (333)..(333): Xaa can be any naturally occurring amino acid
  misc_feature (363)..(364): Xaa can be any naturally occurring amino acid
MYVVPPPQRSDPGSGSGDLRVYQAWKGSNKFFLQGRFIFGPDARSLALTIFLIAAPVAVFCVYVARKLIDDFSDHLGVTIMAIAVIFTIYVLVLLLLTSGRDPGIIPRNAHPPEPEGFEGSLDVGAGQTPQLRLPRIKEVEVNGITVKVKYCDTCMLYRPPRCSHCSICNNCVERFDHHCPWVGQCIGLRNYRFFFMFVFSTTLLCIYVFAFCWVYIVRIMASEETTIWKAMIKTPASIVLIIYTFISMWFVGGLTAFHLYLISTNQTTYENFRYRYDRRANPYNKGVLNNFKEIFCISIPLSKNNFRAMVPREPALPTRSVGGGCVKTTEGXNQNMRKAGEDIEMSRKTVWDMGAGIDDTEXXQINNERVTIKDGELSPEIRTTVDDSDRAGMHPRRSSWGRKSGSWEMSPEVLALAARVGEPNRVGGGGSSSSLAHENRHV

SEQ ID NO: 552 - protein, 206 aa, Glycine max
  misc_feature (151)..(151): Xaa can be any naturally occurring amino acid
  misc_feature (162)..(162): Xaa can be any naturally occurring amino acid
  misc_feature (174)..(174): Xaa can be any naturally occurring amino acid
  misc_feature (184)..(184): Xaa can be any naturally occurring amino acid
  misc_feature (189)..(189): Xaa can be any naturally occurring amino acid
MSGGGCSIVWFRRDLRVEDNPALAAGVRAGAVVCVFIWAPEEEGQYYPGRVSRWWLKQSLAHLDSYLRNLGSPLITKRSTNSISSLLEVVKSTGATQLFFNHLYDPLSLVRDHKAKEVLTAQGITVRSFNSDLLYEPWDVNDAHGQPFTTXSAFWERCLSMXPYDPQAPLLPPXEDDSSDVLKXPLDTXVHKDEVGDADNALSPRP

SEQ ID NO: 553 - protein, 607 aa, Glycine max
MDTNIGSLSLDACKPANNDVGCPPNGAVSAIKPSVPATTMTSSDATLGRHLARRLVQVGVTDVFSVPGDFNLTLLDHLIAEPQLKNIGCCNELNAGYAADGYARCRGVGACVVTFTVGGLSVINAIAGAYSENLPLICIVGGPNTNDFGTNRILHHTIGLSDFSQELRCFQTVTCYQAVVNNIEDAHELIDTAISTCLKESKPVYISISCNLPGIPHPTFSREPVPFSLSPRLSNKMGLEAAVEAAAEFLNKAVKPVMVGGPKLRVANACDAFVELADACGYPFAVMPSAKGLVPEHKPHFIGTFWGAVSTAFCAEIVESADAYLFAGPIFNDYSSVGYSLLLKKEKAIIVQPERVVISNGPAFGCVLMKDFLRELAKRLKHNNTAYENYSRIFVPEGKPVKAEPREPLRVNVLFKHIQDMLSGETAVIAETGDSWFNCQKLKLPKGCGYEFQMQYGSIGWSVGATLGYAQAVPEKRVISCIGDGSFQVTAQDVSTMLRNEQKTIIFLINNGGYTIEVEIHDGPYNVIKNWNYTGLVDAIHNGEGKCWTTKVTCEEELVEAIQTATGDKKDCLCFIEVIVHKDDTSKELLEWGSRVCAANGRPPNPQ

SEQ ID NO: 554 - protein, 227 aa, Glycine max
IRLEGFFKREGTWNTEYGQFFLDWYSTKLVEHGEKILVSAKGIFNSCGVKLSAKVAGIHWHYKTRSHAAELTAGYYNTRFRDGYLPIAQMVAKHGVVLNFTCMEMRDREQHEHCSPEGLVHQVKMAARTAGAELAGENALERYDAGAFSQVLSTSNSGSGLAAFTYLRMNRRLFEGDNWRHFVEFVKCMSEGGKRQRLPQSDSCGTHLYVGHITEKQQEQAQEVALV

SEQ ID NO: 555 - protein, 716 aa, Glycine max
  misc_feature (685)..(685): Xaa can be any naturally occurring amino acid
PRVRWEWAIAPGVSPSPRYQHAAVFVNARLHVSGGALGGGRMVEDSSSVAVLDTAAGVWCDTKSVVTSPRTGRYSADAAGGDAAVELTRRCRHAAAAIGDLIFIYGGLRGGVLLDDLLVAEDLAAAETTAASHAAAAAAASNVQAGRLPGRYGFIDDRTRQTMPETDPDGSVVLGNPVAPPVNGDMYTDISTENALLPGSRRTSKGVEYLVEASAAEAEAISATLAAAKARQVNGEVELPDRDRGAEATPSGKQISSLIKPDSAGSNSIPPGGVRLHHRAVVVAAETGGALGGMVRQLSIDQFENEGRRVSYGTPESTTAARKLLDRQMSINSVPKKVVAHLLKPRGWKPPVRRQFFLDCNEIADLCDSAERIFSSEPSVLQLRAPIKIFGDLHGQFGDLMRLFDEYGAPSTAGDIAYIDYLFLGDYVDRGQHSLETISLLLALKVEYPNNVHLIRGNHEAADINALFGFRIECIERMGERDGIWTWHRINRLFNWLPLAALIEKKIICMHGGIGRSINHVEQIENIQRPITMEAGSIVLMDLLWSDPTENDSVEGLRPNARGPGLVTFGPDRVMEFCNNNDLQLIVRAHECVMDGFERFAQGHLITLFSATNYCGTANNAGAILVLGRDLVVVPKLIHPLPPAISSPETSPERHIEDTWMQELNANRPPTPTRGRPQVTNDRAXCRLQGIRAYPLKASRIKLLFVPVLIAQSSGL

SEQ ID NO: 556 - protein, 145 aa, Glycine max
  misc_feature (1)..(1): Xaa can be any naturally occurring amino acid
  misc_feature (33)..(33): Xaa can be any naturally occurring amino acid
  misc_feature (133)..(133): Xaa can be any naturally occurring amino acid
  misc_feature (136)..(136): Xaa can be any naturally occurring amino acid
  misc_feature (145)..(145): Xaa can be any naturally occurring amino acid
XYKHEESAIEELARDYNANWMTAVEMIDDDIYXGAENSYNLFTVRKNSDAATDEERGRLEVVGEYHLGEFVNRFRHGSLVMRLPDSEMGQIPTVIFGTINGVIGIIASLPHDHYVFLEKLQTTLVKFIKGVGXLSXEQWRSFHNX

SEQ ID NO: 557 - protein, 95 aa, Glycine max
  misc_feature (1)..(1): Xaa can be any naturally occurring amino acid
  misc_feature (95)..(95): Xaa can be any naturally occurring amino acid
XEALEYGDCRLSLAIPQYGIFENVNSLDELAKMPQWTEEKPLRVATGFTYLGPKFMKENGLRHVTFSTADGALEAAPAVRDIDVILELAHLNFLX

SEQ ID NO: 558 - protein, 360 aa, Glycine max
WSQLRRSKHVMRRGSSDSLSQPDRKEIRLGLPSKGRMSADTLELLKNCQLSVKQVNPRQYVAEIPQLSNLEVWFQRPKDITRKLLSGDLDLGIVGLDTFSEHGQGSEDLIIVHEALEYGDCRLSLAIPQYGIFENVNSLDELAKMPQWTEEKPLRVATGFTYLGPKFMKENGLKHVTFSTADGALEAAPAMGIADAILDLVSSGTTLRENNLKEIKGGVVLESQAVFITSRKSVIQRKGVLETTHEMLERLEAHLRAIGQFTVTANMRGSSAEEVAERILSQPSLMGLQGPTVSPVFCKRDGKVTADYYAIVICVPQKALYKSIQQLRAIGGSGVLISPLTYIFDEETPRWRQLLSKLGL

SEQ ID NO: 559 - protein, 487 aa, Glycine max
  misc_feature (92)..(93): Xaa can be any naturally occurring amino acid
MSSTTQNRRSSFTPSTASSLAKAKRHPSSVSSSSSATQNLAVKRAPLANLTNQRNAPYSSSSSSCSNKVAKTKKDSKSTISGNKSSQLKSVXXSSSVVIPKANSLSQKKDAAPTVATFAVPVRSVDVSPSKSDGRFVSMDETTSSCDSIKSPDEVEYLDNRDVSDVDSIQKKIISNLNISDTTEPEGNVCSREIIVELEERVDKIVNIDNIYSDTQLCATYVCDIYKHLRESEEKKRPSTDFMDTIQKDINVSMRAILVDWLVEVAEEYRLVPETLYLTVNYLDRYLSGNAMNRQRLQLLGVSCMMIASKYEEICAPQVEEFCYITDNTYLKEEVLQMESAVLNYLKFEMTAPTVKCFLRRFVRAAAHDVQEIPSLQLEYLTNFIAELSLLEYSMLSYPPSLIAASVIFLARFILFPSKKPWNSTLQHYTLYRPSDLCACVKDLHRLCCSSHDSNLPAIRDKYSQHKYKCVAKKHIPPSIPQEVFQS

SEQ ID NO: 560 - protein, 111 aa, Glycine max
MAAKMLALFALLALCASATSATHIPGHLPPVMPLGTMNPCMQYCMMQRGLASLMACPSLMLQQLLALPLQTMPVMMPQMMTPNMMSPLMMPSMMSPMVLPSMMSQMMMPQC

SEQ ID NO: 561 - protein, 476 aa, Glycine max
MGGGFRVLHLVRPFLSFLPEVQTADRKVPFREKVIYTVISLFIFLVCSQLPLYGIHSTTGADPFYWMRVILASNRGTVMELGITPIVTSGLVMQLLAGSKIIEVDNNVREDRALLNGAQKLLGILIAVGEAVAYVLSGMYGSVGQLGVGNAILIIIQLCFAGIIVICLDELLQKGYGLGSGISLFIATNICENIIWKAFSPTTINSGRGAEFEGAVIALFHLLITRTDKVRALREAFYRQNLPNVTNLLATVLIFLIVIYFQGFRVVLPVRSKNARGQQGSYPIKLFYTSNMPIILQSALVSNLYFISQLLHRKYSGNFFVDLLGKWKESEYGGGQSVPVGGIAYYITAPSSLADMAANPFHALFYLVFMLSACALFSKTWIEVSGSSAKDVAKQLKEQQMVMPGHRESNLQKELNRYIPTAAAFGGICIGALTVLADFMGAIGSGTGILLAVTIIYQYFETFEKERASELGFFGF

SEQ ID NO: 562 - protein, 469 aa, Glycine max
MQALHSPTLRASPLDPLRGPNNAAANRRSSSAKRVFFVSATVAPKVSAPQRQKDPKKRVVITGMGLASVFGNDVEGYYEKLLAGESGITAIDRFDASKFPTRFGGQIRGFSAEGYIDGKNDRRLDDCLRYCIVAGKKALENADLAPDNHSKIDKERAGVLVGSGMGGLTVFSDGVQALIEKGHRKITPFFIPYAITNMGSALLGIDLGFMGPNYSISTACATSNYCFYAAANHIRRGEADLMIAGGTEAAIIPIGLGGFVACRALSQRNDDPKTASRPWDKERDGFVMGEGAGVLVMESLEHAMKRGAPIIAEYLGGAVNCDAYHMTDPRSDGLGVSTCIQSSLEDAGVSPEEVNYINAHATSTLAGDLAEINAIKKVFKDTSGIKINATKSMIGHCLGAAGGLEAIATVKAITTGWLHPTINQFNPEPAVDFDTVANVKQQHEINVAISNSFGFGGHNSVVAFSAFKP

SEQ ID NO: 563 - protein, 457 aa, Glycine max
  misc_feature (23)..(24): Xaa can be any naturally occurring amino acid
  misc_feature (111)..(111): Xaa can be any naturally occurring amino acid
  misc_feature (138)..(138): Xaa can be any naturally occurring amino acid
  misc_feature (153)..(153): Xaa can be any naturally occurring amino acid
  misc_feature (162)..(162): Xaa can be any naturally occurring amino acid
  misc_feature (207)..(207): Xaa can be any naturally occurring amino acid
  misc_feature (220)..(220): Xaa can be any naturally occurring amino acid
  misc_feature (236)..(236): Xaa can be any naturally occurring amino acid
  misc_feature (258)..(258): Xaa can be any naturally occurring amino acid
  misc_feature (389)..(390): Xaa can be any naturally occurring amino acid
FEERTPVPVYVMLPLDTVTMEGXXLNKPRAMNASLMALKSAGVEGVMVDAWWGLVEKDGPLKYNWELYAELVQMVQMHGFEVQLLRSFHQCGGNDGDLCSIALPPRMIAKXYVRGLSWSAPVLNGGTLLQVYSDYMRXSFRYKSRDYLGSVIXEHQLGMGSXVGELRYRSYPETNGTMRFPGKGEFQCYDKYMKASLAAAAEDIGKXEKERKGSYESAQXNQVPEDYWIFEKGKNXWSTEYGQFFLEWYPEELRETEXGILVSDRCIWFQTTGVKLSGTVAGMQLHYKARSNVAKLISGYYNTRHNDGYLPIARMLAKHGVVFNFTCMEMKDREQPDFAYCSPEGLVHQVKMATTTARAELAGENALERYDADAYAQVLSTSKSESGSXXLAAFTYLRMNKRLFEADNWRHLVDFVRNMSEGGRRERLPAADSHGSDLYVGHIKATREKHTQEAALV

SEQ ID NO: 564 - protein, 392 aa, Glycine max
  misc_feature (21)..(21): Xaa can be any naturally occurring amino acid
  misc_feature (172)..(173): Xaa can be any naturally occurring amino acid
  misc_feature (200)..(201): Xaa can be any naturally occurring amino acid
  misc_feature (335)..(336): Xaa can be any naturally occurring amino acid
VSFLLAKSLSFGVWNSTSSEXRSYEGQSDRAQVEDLERRCEVGPSESVFLFTDTMGDPICRIRNSPMYMMLVAELDNELVGVIQGSIKVVTVHEDLAKVGYVLGLRVSPQHRRKGIGSSLVRTLEEWFTSKDVDYAYMATEKDNHASVSLFMDKFGYTKFRTPAILVNPVNXXHCFQISPNIEIARLKIDQAEYLYRRFXXGSTEFFPNDIGNILRNKLSLGTWVAYFKDGQVPNSWAMLSVWNSGEIFKLRLGKAPFSCLVCTKSWWLIHKIFPCLKLPTIPDFFNPFGFYFMYGVHHEGPFSGKLVRALCQFVHNMGAAKDESNCRIIVTEVXXGRDELNHHIPHWKLLSCPEDLWCIKALKNEGTNNKFHELTTKTPPTRALFVDPREV

SEQ ID NO: 565 - protein, 298 aa, Glycine max
  misc_feature (1)..(1): Xaa can be any naturally occurring amino acid
  misc_feature (5)..(5): Xaa can be any naturally occurring amino acid
  misc_feature (78)..(79): Xaa can be any naturally occurring amino acid
  misc_feature (106)..(107): Xaa can be any naturally occurring amino acid
  misc_feature (241)..(242): Xaa can be any naturally occurring amino acid
XSARXGYVLGLRVSPQHRRKGIGSSLVRTLEEWFTSKDVDYAYMATEKDNHASVSLFMDKFGYTKFRTPAILVNPVNXXHCFQISPNIEIARLKIDQAEYLYRRFXXGSTEFFPNDIGNILRNKLSLGTWVAYFKDGQVPNSWAMLSVWNSGEIFKLRLGKAPFSCLVCTKSWWLIHKIFPCLKLPTIPDFFNPFGFYFMYGVHHEGPFSGKLVRALCQFVHNMGAAKDESNCRIIVTEVXXGRDELNHHIPHWKLLSCPEDLWCIKALKNEGTNNKFHELTTKTPPTRALFVDPREV

SEQ ID NO: 566 - protein, 284 aa, Glycine max
  misc_feature (73)..(74): Xaa can be any naturally occurring amino acid
  misc_feature (103)..(104): Xaa can be any naturally occurring amino acid
  misc_feature (284)..(284): Xaa can be any naturally occurring amino acid
MSESKDENPDLPPKSKPQEEHGFAMDFDISLESLWPSDHISLVSNPMSPFLFSTSSEQPFSPVWAFSDAEDEXXQIRIAASEVIQIQQLKIQLKMMTTKKTVXXPLVAMTASENPDGYCLIKERMTQALRHFKELTEQNVLAQVWAPVRNGNRYALTTSGQPFVLDPHSNGLHQYRTASLMYMFSVDGENDEILGLPGRVFQHKIPEWTPNVQFYSSKEYQRLNHAQHYNVRGTLALPVFELARQSCVAVVELIMTSQKINYASEVDKICKAFEAVKLRSSEIX

SEQ ID NO: 567 - protein, 391 aa, Glycine max
  misc_feature (1)..(1): Xaa can be any naturally occurring amino acid
  misc_feature (8)..(8): Xaa can be any naturally occurring amino acid
  misc_feature (76)..(76): Xaa can be any naturally occurring amino acid
  misc_feature (391)..(391): Xaa can be any naturally occurring amino acid
XSGTTQGXPKYVPCNDELYRATRQIFHTSFAFKNREFPIKNGKALSFITVSKQLKTKRGVAARTAPNNVLMYCWFXKCAMRALQSQCCSPDEVIFGPDFFQSLYCHLLCGLIFREKVEFVSSTFAHSIVHAFRTFDQVWEELCNDIRDRVLACGATVPSIRMAMSKLLKPNPELANTIHQKCRGLSNWYGLIPELFPNAKYIYGIMTGSMEPYLKKMRHYAGELPLLTADYGSSEGWIAANVNPQLPPEYATYAVLPHIGYFEFIPLSEFENTKAKPMGLTEVKVGEEYEIVMTNPAGLYRYRLGDVVKVMGFHNSTPELKFIRRSSLLLNINIDKNTEKDLQLAVEAAGKLLAEEKLEVVDFSSQVDLSKEPGHYVIFWEISGEASQELX

SEQ ID NO: 568 - protein, 415 aa, Glycine max
  misc_feature (2)..(2): Xaa can be any naturally occurring amino acid
  misc_feature (32)..(32): Xaa can be any naturally occurring amino acid
  misc_feature (262)..(262): Xaa can be any naturally occurring amino acid
GXLATSSPPPHTNNNLKSGMWTHQSQCCSTVXMIFVSDFLKALYCHLLCGLIFREEVEFISHTFALSIVYSFINLEQECEVLWNDIREGVLTRNVTVPSIRMSMSKLLNPNPELANAIHKKCTGLSNWYGLIPELFPNAKYIYGIMTGSMEPYLAKMRHYAGELPLLTADYGSSEGWIAANVNPQLPPEYATYAVLPHIGYFEFIPLLELENTKPLGLTQVKVGQEYEIVMTNPAGLYRYRLGDVVKVMGFHNSTPELKFIXRSSLLLNINIDKNTEKDLQLAVEAAGKLLAEEKLEVVDFSSQVDLSKEPGHYVIFWEISGDASQELLHECCNCLDKSFVDAGYTSSRKVNCIGALELRLVRRGTFQKILDHYLGLGTAVSQYKTPRCVGPTNTRVLQILSENVVNNYLSTAFN

SEQ ID NO: 569 - protein, 111 aa, Glycine max
  misc_feature (1)..(1): Xaa can be any naturally occurring amino acid
XKIQIVAKTAGMHRNEWVENADRWVAGFLEMFEEGCHKMGTAIRDRIQERLRGQQSRDGTLRLQNGEDDKDDDDEEYYYDDEEDSDEEYFEEYYDDDELNPQNNGKDEKKE

SEQ ID NO: 570 - protein, 453 aa, Glycine max
  misc_feature (367)..(368): Xaa can be any naturally occurring amino acid
  misc_feature (380)..(381): Xaa can be any naturally occurring amino acid
  misc_feature (453)..(453): Xaa can be any naturally occurring amino acid
MERYKLIKEVGDGTFGSVWRAINKQTGEVVAIKKMKKKYYSWEECVNLREVKSLRKMNHPNIVKLKEVIRESDILYFVFEYMECNLYQLMKDREKLFSEGEVRNWCFQVFQGLAYMHQRGYFHRDLKPENLLVTKDFIKIADFGLAREISSQPPYTEYVSTRWYRAPEVLLQSYLYTSKVDMWAMGAIMAELFSLRPLFPGASEADEIYKICGVIGNPTFESWADGLKLARDINYQFPQLAGVHLSALIPSASDDAISLITSLCSWDPCKRPTASEALQHPFFQSCFYIPPSLRNRAVARTPPPAGTRGALDQQGVKRYSGALPTSKLSNNFSSMKLHPPLASGVQRKLDMVNQDGIKNEKPMRTTXXPKYRQPGKDSPXXSMNKGRSVRGVSETAEKLGNLSVSSRRQSMGQPRPPPPMKAGGNWISESGNFILGPAQQIPTGRTFARKVAX

SEQ ID NO: 571 - protein, 294 aa, Glycine max
  misc_feature (34)..(34): Xaa can be any naturally occurring amino acid
  misc_feature (179)..(179): Xaa can be any naturally occurring amino acid
  misc_feature (210)..(210): Xaa can be any naturally occurring amino acid
  misc_feature (217)..(217): Xaa can be any naturally occurring amino acid
  misc_feature (222)..(222): Xaa can be any naturally occurring amino acid
  misc_feature (224)..(225): Xaa can be any naturally occurring amino acid
  misc_feature (232)..(232): Xaa can be any naturally occurring amino acid
  misc_feature (238)..(238): Xaa can be any naturally occurring amino acid
  misc_feature (240)..(240): Xaa can be any naturally occurring amino acid
  misc_feature (242)..(244): Xaa can be any naturally occurring amino acid
  misc_feature (249)..(249): Xaa can be any naturally occurring amino acid
  misc_feature (255)..(255): Xaa can be any naturally occurring amino acid
  misc_feature (257)..(260): Xaa can be any naturally occurring amino acid
  misc_feature (266)..(267): Xaa can be any naturally occurring amino acid
TMTIWNYVVTAHKPTNVTHSCVGNFTSPQDLNLXSSRNAIEERARDYNANWMSAVEIVDDDIYLGAENSFNLFTVRKNSEGATDEERGRLEVVGEYHLGEFVNRFRHGSLVMRLPDSDVGQIPTVIFGTINGVIGVIASLPHEQYVFLEKLQSNLRKVIKGVGGLTHEQWRSFNNEKKXVEARNFLDGNLIESFLDLNRSKMDEISKAVXVSVEELXKKVKXLXXSPPPPPXPRPPPXPXPXXXPQPPXPPPPPXPXXXXPPPPPXXIFSPLFTFCLHFTIHGSQMVYEMDVMF

SEQ ID NO: 572 - protein, 214 aa, Glycine max
  misc_feature (1)..(8): Xaa can be any naturally occurring amino acid
  misc_feature (11)..(11): Xaa can be any naturally occurring amino acid
  misc_feature (21)..(21): Xaa can be any naturally occurring amino acid
  misc_feature (27)..(27): Xaa can be any naturally occurring amino acid
  misc_feature (80)..(80): Xaa can be any naturally occurring amino acid
  misc_feature (85)..(85): Xaa can be any naturally occurring amino acid
  misc_feature (114)..(119): Xaa can be any naturally occurring amino acid
  misc_feature (123)..(123): Xaa can be any naturally occurring amino acid
  misc_feature (129)..(130): Xaa can be any naturally occurring amino acid
  misc_feature (132)..(132): Xaa can be any naturally occurring amino acid
  misc_feature (135)..(135): Xaa can be any naturally occurring amino acid
  misc_feature (137)..(137): Xaa can be any naturally occurring amino acid
  misc_feature (139)..(139): Xaa can be any naturally occurring amino acid
  misc_feature (142)..(143): Xaa can be any naturally occurring amino acid
  misc_feature (146)..(146): Xaa can be any naturally occurring amino acid
  misc_feature (148)..(148): Xaa can be any naturally occurring amino acid
  misc_feature (150)..(152): Xaa can be any naturally occurring amino acid
  misc_feature (157)..(159): Xaa can be any naturally occurring amino acid
  misc_feature (163)..(164): Xaa can be any naturally occurring amino acid
  misc_feature (168)..(169): Xaa can be any naturally occurring amino acid
  misc_feature (171)..(175): Xaa can be any naturally occurring amino acid
  misc_feature (177)..(181): Xaa can be any naturally occurring amino acid
  misc_feature (184)..(189): Xaa can be any naturally occurring amino acid
  misc_feature (191)..(191): Xaa can be any naturally occurring amino acid
  misc_feature (193)..(193): Xaa can be any naturally occurring amino acid
  misc_feature (195)..(199): Xaa can be any naturally occurring amino acid
  misc_feature (202)..(207): Xaa can be any naturally occurring amino acid
  misc_feature (210)..(214): Xaa can be any naturally occurring amino acid
XXXXXXXXRLXTGPPLESATXAPPPPXENSTQLVKILRSAANAKRDLVFGYVGINQWDGFVETFDVAKSSQLPKLLVWDXDEEYXLLDGSYRLEEGDQASHISQFLEGFRAGRXXXXXXSPPXFLGFLXXSXVIXNXLXILXXVIXLXFXXXELCWXXXYTSXXTNSXXGXXXXXLXXXXXDVXXXXXXFXYXVXXXXXCRXXXXXXNYXXXXX

SEQ ID NO: 573 - protein, 135 aa, Glycine max
  misc_feature (25)..(26): Xaa can be any naturally occurring amino acid
  misc_feature (64)..(64): Xaa can be any naturally occurring amino acid
LALYNIQGQSAYIKPIHKKCVPLKXXVIAVTILLLAVIMASPSSSNTSLVARLKLDVESEKCWXEVVMFFLNGETYLGPSCCQAIKISGHDCWPNMLASVGFTSEEGDILQGYCDTEQEQLHSPPSPTSPTTVVH

SEQ ID NO: 574 - protein, 469 aa, Glycine max
  misc_feature (409)..(410): Xaa can be any naturally occurring amino acid
MRIPSTLVEVLLVFALFCSSPWTVWSSNTLCQQTNEEVRPHSVSITEFGAVGDGVTLNTKAFQNAIFYLNSFADKGGAKLFVPAGRWLTGSFDLISHLTLWLDKDAVILGSTNPEDWPVVDPLPSYGRGRELPGGRHKSLIYGHNLTDVIITGNNGTIDGQGSIWWNRFLNRSLDYTRPHLVELMNSTGVLISNLTFLNSPFWTIHPVYCSQVTVQNVRILAPHDSPNTDGIDPDSSDNVCIEDCYISTGDDLIAIKSGWDEYGIAYGRPSTNIIIHRLVGKTQTSGIAIGSEMSGGVSEVHAEDIQFYDSYNGIRIKTSPGRGGYVRNIYVSNVSLANVDIAIWFTGSYGEHPDDAYDPNALPVIEKVTIKDVVGENIKTAGLIEGIEGDNFVNICLSNIILNVTSNXXPWNCSYVKGYSDLVQPEACEPLKERIFPDHCSDCYYLTNQIQSSNSQNRAGQTSGDIRG

SEQ ID NO: 575 - protein, 592 aa, Glycine max
  misc_feature (42)..(42): Xaa can be any naturally occurring amino acid
  misc_feature (103)..(103): Xaa can be any naturally occurring amino acid
  misc_feature (128)..(128): Xaa can be any naturally occurring amino acid
  misc_feature (412)..(412): Xaa can be any naturally occurring amino acid
  misc_feature (426)..(426): Xaa can be any naturally occurring amino acid
  misc_feature (442)..(442): Xaa can be any naturally occurring amino acid
MAWLGLLCMNSCVLVMIISFGEIIRLEGNSATIQVYEETAGXLMVNDPVLRTHKPLSVELGPGILGNIFDGIQRPLKTIAKRSGDVYIPRGVSVPALDKDTLXWEFQPKKIGEGDLLTGGDLYATVFXENSLMQHHIALPPDNMGKITYIAPPGQYSIKDTVLELEFQGVKKKFTMLQTWPVRTPRPVASKLAADTPLLTGQRVLDALFPSVLGGTCAIPGAFGCGKTVISQALSKYSNSDAVVYVGCGERGNEMAEVLMDFPQLTMTLPDGREESVMKRTTLVANTSNMPVAAREASIYTGITLAEYFRDMGYNVSMMADSTSRWAEALREISGRLAEMPADSGYPAYLAARLASFYERAGKVKCLGGPERTGSVTIVGAVSPPGGDCSDPVTSATLRIVKFFWGVDKKIXNCSACGQGCCIIYXTKSSTALEKFYEEDYXCSKCLYTNMTNVLQREDDLNEIVQLVGKDALGEGDKITLETAKLLREDYLAQNAFTPYDKFCPFYKSVWMMRNIIHFYNLANQAVERGAGSDGQKISYTLIKHRMGDLFYRLVSQKFEDPAEGEAALVAKFQKLHEDLTNGFRNLEDETR

SEQ ID NO: 576 - protein, 624 aa, Glycine max
  misc_feature (607)..(607): Xaa can be any naturally occurring amino acid
MPAVYGARLTTFEDSEKESEYGYVRKVSGPVVVADGMAGAAMYELVRVGHDNLIGEIIRLEGDSATIQVYEETAGLMVNDPVLRTHKPLSVELGPGILGNIFDGIQRPLKTIAKRSGDVYIPRGVSVPALDKDTLWEFQPKKIGEGDLLTGGDLYATVFENSLMQHHIALPPDNMGKITYIAPPGQYSLQDTVLELEFQGVKKKFTMLQTWPVRTPRPVASKLAADTPLLTGQRVLDALFPSVLGGTCAIPGAFGCGKTVISQALSKYSNSDAVVYVGCGERGNEMAEVLMDFPQLTMTLPDGREESVMKRTTLVANTSNMPVAAREASIYTGITLAEYFRDMGYNVSMMADSTSRWAEALREISGRLAEMPADSGYPAYLAARLASFYERAGKVKCLGGPERTGSVTIVGAVSPPGGDFSDPVTSATLSIVQVFWGLDKKLAQRKHFPSVNWLISYSKYSTALETFYEQFDPDFINIRTKAREVLQREDDLNEIVQLVGKDALAEGDKITLETAKLLREDYLAQNAFTPYDKFCPFYKSVWMMRNIIHFYNLANQAVERGAGSDGQKISYTLIKHRMGDLFYRLVSQKFEDPAEGEAALVAKFQKXLHEDLTNGFRNLEDETR

SEQ ID NO: 577 - protein, 180 aa, Glycine max
  misc_feature (1)..(1): Xaa can be any naturally occurring amino acid
  misc_feature (96)..(96): Xaa can be any naturally occurring amino acid
  misc_feature (116)..(116): Xaa can be any naturally occurring amino acid
  misc_feature (162)..(162): Xaa can be any naturally occurring amino acid
  misc_feature (168)..(168): Xaa can be any naturally occurring amino acid
  misc_feature (171)..(171): Xaa can be any naturally occurring amino acid
  misc_feature (180)..(180): Xaa can be any naturally occurring amino acid
XEKLLSEESFLRLKESGTGLHTKSVDELISMAHKFYDEVALPKLAMDFGSLELSPVDGRTLTDFMHLRGLQMRSLGKVVKLAENLPHIQSLCIHEXAFKHLPSAVTKHVDTLLKTXSASIASTLNFLLVGSRTEDGADQILIDDHNLRFNGTSVFVQRFGWXLNDEFXHLXKLSILRGLX

SEQ ID NO: 578 - protein, 412 aa, Glycine max
MELFATTMVAMAAATASTQLIFSKPCSPSRLCPFQLCVFDTKQVLSSGRRRHVGGSGVRCMAVGEAATTGTKKRSGYELQTLTSWLLKQEQAGVIDAELTIVLSSISMACKQIASLVQRANISNLTGVQGAVNVQGEDQKKLDVVSNEVFSNCLRSSGRTGIIASEEEDVPVAVEESYSGNYIVVFDPLDGSSNIDAAASTGSNFWIYSPNDECLADIDDDPTLDTTEQRCIVNVCQPGSNLLAAGYCMYSSSIIFVLTLGNGVFVFTLDPMYGEFVLTQENLQIPRAGKIYAFNEGNYQLWDEKLKKYIDDLKDPGQSGKPYSARYIGSLVGDFHRTLLYGGIYGYPRDKKSKNGKLRLLYECAPINFIVEQAGGKGTDGLQVLRLQGTEIHQRVPLYIGEEVEKVEKYLA

SEQ ID NO: 579 - protein, 410 aa, Glycine max
MVAMAAATASSQLIFSKPRSPSRLCPFQLCVFDTKQVLSSSSGRRRHVGGSGVRCMAVGEAATTETKKRSGYELQTLTNWLLKQEQAGVIDAELTIVLSSISMACKQIASLVQRANISNLTGVQGAVNVQGEDQKKLDVVSNEVFSNCLRSSGRTGIIASEEEDVPVAVEESYSGNYIVVFDPLDGSSNIDAAVSTGSIFGIYSPNDECLADIGDDPTLDTTEQRCVVNVCQPGSNLLAAGYCMYSSSIIFVLTLGNGVFVFTLDPMYGEFVLTQENLQIPRAGKIYAFNEGNYQLWDDKLKKYIDDLKDPGPSGKPYSARYIGSLVGDFHRTLLYGGIYGYPRDKKSKNGKLRLLYECAPMSFIVEQAGGKGSDGHQRILDIQPTEIHQRVPLYIGSVEEVEKVEKYLA

SEQ ID NO: 580 - protein, 414 aa, Glycine max
  misc_feature (232)..(232): Xaa can be any naturally occurring amino acid
MVAMAAATASTQLIFSKPRSPSRLCPFQLCVFDTKQVLSSSSGRRRHVGGSGVRCMAVGEAATTGTKKRSGYELQTLTNWLLKQEQAGVIDAELTIVLSSISMACKQIASLVQRANISNLTGVQGAVNVQGEDQKKLDVVSNEVFSNCLRSSGRTGIIASEEEDVPVAVEESYSGNYIVVFDPLDGSSNIDAAVSTGSIFGIYSPNDECLADIGDDPTVSLLDTTEQRCVVXNVCQPGSNLLAAGYCMYSSSIIFVLTLGNGVFVFTLDPMYGEFVLTQENLQIPRAGKIYAFNEGNYQLWDDKLKKYIDDLKDPGPSGKPYSARYIGSLVGDFHRTLLYGGIYGYPRDKKSKNGKLRLLYECAPMSFIVEQAGGKGSDGHQRILDIQPTEIHQRVPLYIGSVEEVEKVEKYLA

SEQ ID NO: 581 - protein, 108 aa, Glycine max
  misc_feature (10)..(10): Xaa can be any naturally occurring amino acid
  misc_feature (12)..(12): Xaa can be any naturally occurring amino acid
  misc_feature (14)..(14): Xaa can be any naturally occurring amino acid
  misc_feature (16)..(16): Xaa can be any naturally occurring amino acid
  misc_feature (18)..(18): Xaa can be any naturally occurring amino acid
  misc_feature (20)..(20): Xaa can be any naturally occurring amino acid
  misc_feature (26)..(26): Xaa can be any naturally occurring amino acid
  misc_feature (30)..(30): Xaa can be any naturally occurring amino acid
  misc_feature (36)..(36): Xaa can be any naturally occurring amino acid
  misc_feature (46)..(46): Xaa can be any naturally occurring amino acid
  misc_feature (58)..(58): Xaa can be any naturally occurring amino acid
  misc_feature (62)..(62): Xaa can be any naturally occurring amino acid
  misc_feature (76)..(76): Xaa can be any naturally occurring amino acid
  misc_feature (78)..(78): Xaa can be any naturally occurring amino acid
  misc_feature (85)..(85): Xaa can be any naturally occurring amino acid
  misc_feature (89)..(89): Xaa can be any naturally occurring amino acid
  misc_feature (95)..(95): Xaa can be any naturally occurring amino acid
  misc_feature (105)..(105): Xaa can be any naturally occurring amino acid
  misc_feature (107)..(108): Xaa can be any naturally occurring amino acid
GQIPTVIFGXIXGXIXVXAXFPHEQXVFLXKLQSNXRKVIKGVGGXSHEQWRSFNNEXKTVXARNFLDGDLIESFXDXNRSKMDXISKXLDVSVXELCKRVEELXRXX

SEQ ID NO: 582 - protein, 782 aa, Glycine max
  misc_feature (104)..(104): Xaa can be any naturally occurring amino acid
  misc_feature (127)..(127): Xaa can be any naturally occurring amino acid
  misc_feature (217)..(218): Xaa can be any naturally occurring amino acid
MSEMASPDPEGLDGVRMTWNVWPRTKVESSKCVIPLAATVALIRPHPDIPRLQYAPLRCKTCSSALNPFSRVDFTAKIWICPFCYQRNHFPPHYHAISETNFPXDLYPQYTTVEYLPPNSLNPSPVXSFEYFRMLLDRENISNAAVMIQPSLISYSFNALPAPALLDVASIAADKILLLDSYFSVVIFHGMTIAQWRNLGYQNQQEHQAFAQLLRAXXHDDAQMMIRGKHLMLHGGWIGFSFASVQRFLVPAYEGEKILNALLDELQTDQWPVPPGRRPARCTGVALSVAAGLLSACNPGTGARIVALVGGPCTEGPGAIVSKDLSDPVRSHKDLDKDAAPFFKKAVKFYEGLAKQLVGQGHVLDIFASALDQVGVAEMKVAVERTGGLVVLSESFGHSVFKDSFKRVFEDGEQSLGLCFNGTLEINCSKEIKIQGIIGPCTSLEKKGPSVADTVIGEGNTTAWKMCGLDKSTCLTVMFDLSSSDRSNTPGAVNPQLYLQFLTSYQDPSGQSVLRVTTVTRRWVDSSVSSEELVQGFDQETAAVVMARFASLKMESEETFDATRWLDRFLIRLCSKFGDYRKDDPSSFTLNPSFSLFPQFMFNLRRSQFVQVFNNSPDETAYFRMLLNRENISNAAVMIQPSLISYSFNALPAPALLDVASIAADKILLLDSYFSVVIFHGMTIAQWRNLGYQNQQEHQAFAQLLRAPHDDAQMIIRERFPVPRLVVCDQHGSQARFLLAKLNPSATYNNAHEMAAGSDVIFTDDVSLQVFFEHLQRLAVQS

SEQ ID NO: 583 - protein, 224 aa, Glycine max
MAAAGCQKLLELSTKIVAVGRNYAAHAKELGNAVPKEPVLFLKPTSSYLSNGGTIQIPHNEGSLHHEVELAVVISKKARDVSESSAMDYVAGYALALDMTARDLQAAAKSAGLPWSLAKGQDTFTPISSILPKTTVPNPDDLELWLKVDEEIRQKGSTKDMIFKIPFLISYVSSVMTLFEGDVILTGTPPGVGPVKEGQTITAGITGLVDVQFNVEKRARPVLS

SEQ ID NO: 584 - protein, 424 aa, Glycine max
  misc_feature (424)..(424): Xaa can be any naturally occurring amino acid
GLVGKCVQNLTKLTLTPQIKLAAAATTTTTTNLLFNLGSTIKTNLSHHQDFGMEPYSIDGVSSQTNSKFYDDDGHVKRTGTVWTTSSHIITAVVGSGVLSLAWAMAQMGWVAGPAVMIFFSVVTLYTTSLLADCYRCGDPVTGKRYYTFMDAVQSILGGYYDCICGVVQYSNLYGTAVGYTIAASISMMAIKRSNCFHSSGGKSPCQVSSNPYMIGFGIIQILFSQIPDFHETWWLSIVAAIMSFVYSTIGLALGIAKVAEMGTFKGSLTGVRIGTVTEATKVWGVFQGLGDIAFAYSYSQILIEIQDTIKSPPSEAKTMKKSAKISIGVTTTFYMLCGFMGYAAFGDSAPGNLLTGFGFFNPYWLIDIANAAIVIHLVGAYQVYAQPLFAFVEKWASKRWPEVETEYKIPIPCFSPYNLSPFX

SEQ ID NO: 585 - protein, 255 aa, Glycine max
  misc_feature (243)..(243): Xaa can be any naturally occurring amino acid
MWKLKIAEGGDGLISVNNFIGRQHWEFDPNAGTPQERAQVERVREEYKKNRFCIKQSGDLLMRMQLTKENTCGPILARVNVKDTENVTEEALITTMRKAINFYSSIQAHDGHWPAESAGPLFFLQPLVMALYITGSLNDVLGPEHQKEIIRYLYNHQNEDGGWGLHIESHSTMFGSALSYIALRILGEGPEDGEDRAMARGRKWILDHGGLEAIPSWGKFWVTVLGVYEWSGCNPLPPEFWVXKKKKKKKKKKKR

SEQ ID NO: 586 - protein, 363 aa, Glycine max
  misc_feature (97)..(98): Xaa can be any naturally occurring amino acid
  misc_feature (116)..(117): Xaa can be any naturally occurring amino acid
  misc_feature (274)..(275): Xaa can be any naturally occurring amino acid
MPAVISTNPASSQQQMQRNQQQQQILQHQKQNQFAAAAAAAARNKTPSTSNGSVYSDNLPSTSSMANKFPSAVSAFPQSLVQSSNTVAQSPQWKNSXXRATTTSQSPPSMASTTPXXSSVKNLPQQQARSQQPHTQISFATNPKSSAAQVQPSSSTQSPSPPVMVGSPTTSSMSKNTGSPRTTSASTTNNKISQSSSLSSQQAKNSSAVPARKSSPVGSRNVPSILNVPQLTPSSKQQPQQQIPKQALQQAQLLFSSPYVHPQSNSTTSTTTVXXSGYYLQHQQRRGPEQMQRPGSSPAVNNVKGSSALPTQGLLHPAQVAAMQPSGSHPQFVPTGFSYASYHVHSVPSVQVKPAEQKQPAGE

SEQ ID NO: 587 - protein, 223 aa, Glycine max
  misc_feature (1)..(1): Xaa can be any naturally occurring amino acid
  misc_feature (45)..(46): Xaa can be any naturally occurring amino acid
  misc_feature (198)..(199): Xaa can be any naturally occurring amino acid
  misc_feature (219)..(219): Xaa can be any naturally occurring amino acid
XIFNDMLFSSALSRRATSYEMIRDYDQAASDIRRVVSLLINRNQXXGISDRSISYANDLKHNQIWLSEIEEEAKKGIPLDMYLILGVEHSVSSSEIKKAYHKAALRHHPDKAGQSLARSDNGDDQIWKDIVEEISKDADRLFKIIGEAYAVLSDTAKRSQYDSEEEMRNSQKKRHGNSINRNNVIDQTDNRRHWKEVXXRSSGNSSFKDSEAGRSSRQXENLC

SEQ ID NO: 588 - protein, 188 aa, Glycine max
  misc_feature (1)..(1): Xaa can be any naturally occurring amino acid
  misc_feature (69)..(69): Xaa can be any naturally occurring amino acid
XLYECVQTIMSVEDNGGLRVLAINILGRFLSHKDNNIRYVGLNMLMKAVTVDAQAVQRHRATILECLKXFSPEKIWYIDQMLKVLSEAGNFVKDEVWHALIVVISNASELHGYTVRALYKAFKMSAEQETLVRVAVWCIGEYGDILINNAGMLDVEDPVTVSESDVVDVVEIALKCHASDLTTKAMAL

SEQ ID NO: 589 - protein, 666 aa, Glycine max
  misc_feature (1)..(1): Xaa can be any naturally occurring amino acid
  misc_feature (209)..(210): Xaa can be any naturally occurring amino acid
  misc_feature (224)..(225): Xaa can be any naturally occurring amino acid
  misc_feature (267)..(268): Xaa can be any naturally occurring amino acid
  misc_feature (313)..(313): Xaa can be any naturally occurring amino acid
  misc_feature (388)..(388): Xaa can be any naturally occurring amino acid
  misc_feature (391)..(392): Xaa can be any naturally occurring amino acid
  misc_feature (647)..(647): Xaa can be any naturally occurring amino acid
XRQATKLRSSEILDHPHTQICNEGRQNALSEILEILTVVCETHNLPLAQTWIPCKHRSVLAQGGGVKKSCSSFDGRCMGKVCMSTTDIAFYIIDAHLWGFREAWVEHHLQQGQGVAGRAFLSHGMCFCSNITQFYKTDYPLVHYALMFGLTICFQICLSRWPTRNVDHLPEFFLPPRITHIHEQKTLLGSILAIMKQHFQSLHIASGVXXPEDGSIEIIEATIXXRVHTRLESIPIASSIKSPPRPDTSPNMGEEVPQDPSEQQILXXTVMTSIMEGKPLERKRGKTEKSISLEVLQRYFAGSLKDAAKSLGXQHGISRWPSRKINKVNRSLSKLKRVIESVQGAEGAFGLNSLSKSPLPIAVGSFPEPSTPNKFSLPASLSINPSEXSDXXENELNASKALETNSQAKRTRTASEDSTNPTSHGSCHDSPPNESSPVKNIFITSNNDPGLKRSPESTLQLTTNTPNRPAAYPMPDFVAAELQEPFGGMLIEDAGSSKDLRNLCPSVAETILEDMIPEACGTNIPGPDLSPKQSMGTPNKAVTPSMKEMKTVTIKATYREDIIRFRVSLTCGIVELKEEVAKRLKLEVGTFDIKYLDDDHEWVLIACDADLQECMDVSRSSGSNIIRVLVHDITSNLGSSCESSGEXEVAVYRLSLYSNYVGSCGV

SEQ ID NO: 590 - protein, 485 aa, Glycine max
MSTQNRRSSFSSSTTSSLAKRHASASTTSSSAAAPANMAKKRPPLSNLTNTVAHRNSSSSVPCAAKFAKTKKDVVPACSGNKRPTLANVKPASAAIFPKANSFPVRDEAPPTPPPPVATVTVPAPVVDVSPSKSDAMSVSTDESMSSCDSFKSPDIEYVDNSDVAAVDSIERKTFSHLNISDSTEGNICSREILVELEKGDKFVNVDNNYADPQLCATFACDIYKHLRASEAKKRPSTDFMEKIQKEINSSMRAILIDWLVEVAEEYRLVPDTLYLTVNYIEDRYLSGNVMNRQRLQLLGVASMMIASKYEEICAPQVEEFCYITDNTYFKEEVLQMESAVLNFLKFEMTAPTVKCFLRRFVRAAQGVDEVPSLQLECLTNYIAELSLMEYSMLGYAPSLIAASAIFLAKFILFPSKKPWTSTLQHYTLYKPSDLCVCVRDLHRLCCNSPNSNLPAIREKYSQHKYKYVAKKYCPPSIPPEFFQN

SEQ ID NO: 591 - protein, 183 aa, Glycine max
  misc_feature (1)..(1): Xaa can be any naturally occurring amino acid
  misc_feature (126)..(126): Xaa can be any naturally occurring amino acid
  misc_feature (165)..(165): Xaa can be any naturally occurring amino acid
  misc_feature (171)..(171): Xaa can be any naturally occurring amino acid
  misc_feature (174)..(174): Xaa can be any naturally occurring amino acid
  misc_feature (183)..(183): Xaa can be any naturally occurring amino acid
XEKLLSEESFLRLKESGTGLHTKSVDELISMAHKFYDEVALPKLAMDFGSLELSPVDGRTLTDFMHLRGLQMRSLGKVVKLAENLPHIQSLCIHEMITRAFKHLLKAVIASVENVADLSAAMAITXLNFLLGGSRTEDGADQILIDDHNLRFNGTSVFVQRFGWXLNDEFXHLXKLSILRGLX

SEQ ID NO: 592 - protein, 601 aa, Glycine max
MQMENIVCVAQRINMGTRITFQLEERYNLQHGMSGAGGAIRVERARKQRATTHGFKLDRGLVKKQRRVGVPFKAAATAESEAQVRTISKDPIMLANYVPVYVMLPLGVVTNDNVLQDRVGLENQLKELQAAGVDGVMVDVWWGIVESKGPQQYDWSAYRTLFRLEQDCKLKLQAIMSFHKCGGNVGDSVLIPLPKWVLEIGESDPDIFYTNRKGIRNKECLSLGVDNQPLFHGRTAIELYTDYMQSFRDNMEDFLESELMIDIEVGLGPAGELRYPSYTKNLGWEFPGIGEFQCYDKYLKADFKGAALRADHPEWELPDNAGESNDVPESTEFFKSGGTYQTEKGKFFLTWYSNKLLTHGDEILDEANNVFLGCKVKLAAKVAGIHWWYKAESHAAELTSGYYNLHHRDGYRPVARMLSRHNAILNFTCLEMRNHEQPAKAQSGAQELVQQVLSCGWMENLEVAGENALARYDREAYNQILLNARPNGVNQFGPPTLKMYGVTYLRLSDKLMQQTNFNIFKAFVRKMHANLEYCPDPEKYYHFTVPMERSKPKIPLEVLLEATKPVEPYPWYKETDMSLDVTGFLDYIVAIIVRIFKLKLN

SEQ ID NO: 593 - protein, 455 aa, Glycine max
  misc_feature (412)..(413): Xaa can be any naturally occurring amino acid
  misc_feature (433)..(433): Xaa can be any naturally occurring amino acid
  misc_feature (452)..(452): Xaa can be any naturally occurring amino acid
GCVVGIQHEHDTNKEQRMRMKRVFVVYSVLLLLVQFWLGEAETFSVDGKVLVLDESNFDSAIASFDHILVDFYAPWCGHCKRLSPELDAAAPVLATLKEPIIIAKVDADKHTRLAKKYDVDAYPTILLFNHGVPTEYRGPRKADLLVRYLKKFSASDVSILDSDSAVNMFVEEAGTFFPVYIGFGLNSSVLEKSGIKYKKNAWFSVAKDFSEDLMVLHDFDKIPALVSLNPQYNERNTFYGPFEEDFLEDFVRQNLIPLAVPVSYETLKLMKADGRKIVLTIVEDEDEETTRELIKLLKAAASANRDLIFGYVGVKQMEEFAENFDIDTKLPKMVIWDKSDDYLSVVDSETIEGEDQGTQITKFLEGYREGRTIKKTFSGPSLMRFIHRSFDIRMVYIIVFVVAVLMLIQTXXVKEVMNTRVYPIKFKLIMQXSSVSEAENNEYKPGDKEDXKLT

SEQ ID NO: 594 - protein, 305 aa, Glycine max
  misc_feature (1)..(1): Xaa can be any naturally occurring amino acid
  misc_feature (13)..(13): Xaa can be any naturally occurring amino acid
  misc_feature (80)..(80): Xaa can be any naturally occurring amino acid
  misc_feature (96)..(96): Xaa can be any naturally occurring amino acid
  misc_feature (287)..(288): Xaa can be any naturally occurring amino acid
  misc_feature (305)..(305): Xaa can be any naturally occurring amino acid
XSDHWGISIMAVXAVVFTVYVLVLLLLTSGRDPGIIPRNAHPPEPEGLDSNLDVGAGQTPQLRLPRFKEVEVNGIPVKVXYCDTCMLYRPPRCSHXSICNNCVERFDHHCPWVGQCIGLRNYRFPTRPVFSTTLLCIYVFAFCWVYIVRIMASEETTIWKAMIKTPASIVLIIYTFISMWFVGGLTAFHLYLISTNQTTYENFRYRYDRRANPYNEGVLNNFKEIFCISIPLSKNNFRAMVPREPALPTRSVGGGFMNHNLRKAGEDIEMGRKTVWDMGAGMDDNGXXPINDDRVTIKDGELSPX

SEQ ID NO: 595 - protein, 206 aa, Glycine max
  misc_feature (1)..(1): Xaa can be any naturally occurring amino acid
  misc_feature (169)..(169): Xaa can be any naturally occurring amino acid
  misc_feature (206)..(206): Xaa can be any naturally occurring amino acid
XLQTVNLRSSEILDHPHTQICNEGRQNALSEILEILTVVCETHNLPLAQTWIPCKHRSVLAQGGGVKKSCSSFDGRCMGKVCMSTTDIAFYIIDAHLWGFREACVEHHLQQGQGVAGRAFLSHGMCFCSNITQFYKTDYPLVHYALMFGLTTCFAICLRSSHTGNDDYXVLEFFLPPRITHIHEQKTLLGSILAIMTQHFQSLHIX

SEQ ID NO: 596 - protein, 204 aa, Glycine max
AGGSVKGDDGPSLCCNEPSLSEVYADVMRVTNKPMMGRDSANRAQQTPVREKRKKASNKKAPKPPRPPKAPSLDAADHKLIREISELAMLKRARMERMKTPRVRKIAKSSAPSSSNASSLLAMIFTVVFFVVIILQGMSSGKTSVASFQGSPVSAGESEDGLISVHYQLNPSAIDSNAPGSESHTFVQQVAGSDLPEKLRRDSG

SEQ ID NO: 597 - protein, 215 aa, Glycine max
  misc_feature (200)..(201): Xaa can be any naturally occurring amino acid
  misc_feature (209)..(209): Xaa can be any naturally occurring amino acid
  misc_feature (212)..(212): Xaa can be any naturally occurring amino acid
WRIVCPSPIIETRNNNLEMQSVNNKSLIEELDKLLERLRVPSEYATNLTGGSFDEARMLQNVEACEWLTSALRGLGVPNLDPSYANMRTVKEKRAELEKLKSTFVRRASEFLRNYFASLVDLMISDKSYFSQRGQLKRPDHADLRYKCRTYARLLQHLKSLDKNCLGPLIKAYCSSLNLLLRRELFSLCSILKALRKVDXXPVSYTNIXKSXSIN

SEQ ID NO: 598 - protein, 484 aa, Glycine max
MVENGVGSKYLQQTLNVSIDMHQHGISKCFDDDGRPKRTGTVWTSSAHIITAVIGSGVLSLAWAIAQLGWIAGPIVMVIFSAITYYTSTLLADCYRTGDPVTGKRNYTYMDAIQSNFGGIKVKLCGLVQYVNLFGVAIGYTIAASTSMMAIERSNCFHKSGGKDPCHINSNMYMISFGIVEILFSQIPGFDQLWWLSIVAAVMSFTYSTIGLGLGIGKVIENGGVGGSLTGITIGTVTQTDKVWRTMQALGDIAFAYSYSLILIEIQDTVKSPPSESKTMKKASFISVAVTSIFYMLCGCFGYAAFGDASPGNLLTGFGFYNPYWLLDIANAAIVIHLVGSYQVYCQPLFAFVEKHAAQMFPDSDFLNKEIEIPIPGFHPYRLNLFRLVWRTIYVMLSTVISMLLPFFNDIGGLLGAFGFWPLTVYFPVEMYIIQKRIPKWSTKWICLQILSMTCLLMTIGAAAGSIAGIAIDLRTYKPFKTNY

SEQ ID NO: 599 - protein, 161 aa, Glycine max
  misc_feature (1)..(1): Xaa can be any naturally occurring amino acid
  misc_feature (159)..(159): Xaa can be any naturally occurring amino acid
  misc_feature (161)..(161): Xaa can be any naturally occurring amino acid
XFGSSGSVSSLAWFMSNQETSFVTIGQRVLARPLKVRFHYGHPDVFDRIFHITRGGISKASCGINLSEDIFAGFNSTLRRGNITHHEYIQCGKGRDVGLNQISLFEAKVACGNGEQTLSRDIYRLGHRFDFFRMLSCYFTTIGFYISSMIVGLTCYAFXYX

SEQ ID NO: 600 - protein, 446 aa, Glycine max
  misc_feature (1)..(1): Xaa can be any naturally occurring amino acid
XRVSSRRPPPPRGLTVGTATTHYYASEEFKIKQHKTKSFTCSPQEVISGGDYKQSTYCHLLLGLYFSDQVEFITSAFIYSMVQAFTTFEELWREICNDIRDGTLSSRIKSSKMRKAALDIFSPSPNLASKLEDSCKELEGVDWFGLIPKLWPNAKYVYSIMTGSMQPYLKKLRHYANGLPLVSAEYGSTESWIGVNVDPSLPPEDVTFAVVPTFSYFEFIPLHRNEKNFSSGGDDFIEDKPIPLSQIKVGQEYEVVLTTFTGLYRCRLGDVVEVAGFHNGTPKLNFVCRRKLILTINIDKNTEKDLQLVVERGSHILNMTSRGELVDFTSYADVSKQPGHYVIYWEIKGEVEDKILGACCNEMDKSFADHGYVVSRKTNSIGPLELCVLESGTFKKILDSFIANGAALSQFKTPRCTNNHVLLKILNTCTTKKFRSTAYNSCSMEQ

SEQ ID NO: 601 - protein, 315 aa, Glycine max
  misc_feature (7)..(7): Xaa can be any naturally occurring amino acid
CIQLKFXDKFRDYLGSVIMEIQVGMGPCGELRYPSYPESNGTWRFPGIGEFQCYDKYMRASLEASTEAIGKKEWGKNGPHDSGQYNQFPEDTGFFQREGTWNTEYGRFFLDWYSTKLLEHGEKILVSAKGIFNSCGVKLSAKVAGIHWHYKARSHAAELTAGYYNTRFRDGYLPIAQMLAKHGVVLNFTCMEMRDREQPEHCSPEGLVHQVKMAARTAGAELAGENALERYDAGAFSQVLSTSNSGSGLAAFTYLRMNRRLFEGDNWRHFVEFVKCMSEGGKRQRLPQSDSCGTHLYVGHITEKQQEQAQEVALV

SEQ ID NO: 602 - protein, 312 aa, Glycine max
  misc_feature (109)..(110): Xaa can be any naturally occurring amino acid
  misc_feature (312)..(312): Xaa can be any naturally occurring amino acid
MFTVLLLFSLLLTTSTSHNIISYPHFQQLNVKQILTETKLNPTNTYKHLQHQKLNIATEASSPAKYKLKLVHRDKVPTFNTSHDHRTRFNARMQRDTKRVAALRRHLAXXGKPTYAEEAFGSDVVSGMEQGSGEYFVRIGVGSPPRNQYVVIDSGSDIIWVQCEPCTQCYHQSDPVFNPADSSSFSGVSCASTVCSHVDNAACHEGRCRYEVSYGDGSYTKGTLALETITFGRTLIRNVAIGCGHHNQGMFVGAAGLSGLGGGPMSFVGQLGGQTGGAFSYCLVSRGIESSGLLEFGREAMPVRAAWVPLIX

SEQ ID NO: 603 - protein, 312 aa, Glycine max
  misc_feature (71)..(71): Xaa can be any naturally occurring amino acid
LARTRTILHSFTHTHTNIGTDTEKIVMEEQECQVVENKETPTPPVRVYADGIYDLFHFGHARSLEQAKKTXFPNTYLLVGCCNDEITHKYKGKTVMTEKERYESLRHCRWVDEVIPDAPWVITREFLDKHQIDYVAHDSLPYADASGAGKDVYEYVKSVGKFKETKRTDGISTSDIIMRIIKDYNQYVMRNLDRGYTRKELGVSYVKEKRLRMNMGLKKLQERVKNHQEKVGKKIQTVGKIAGMHPNEWVENADRLVAGFLEMFEEGCHKMGTAIRDRIQEQLKAQQLKSLLYDEWDDDEFYVDDDDEYYTD

SEQ ID NO: 604 - protein, 117 aa, Glycine max
  misc_feature (1)..(1): Xaa can be any naturally occurring amino acid
  misc_feature (13)..(13): Xaa can be any naturally occurring amino acid
XYPRKRLGVSYVXEKRLRMNMGLKKLQERVKKQQEEVGKKIQTVGKIAGMHPNEWVENADRLVAGFLEMFEEGCHKMGTAFRDRIQERLRAQQLKSLLYDEWDDDNEFYDDDEYYTD

SEQ ID NO: 605 - protein, 162 aa, Glycine max
  misc_feature (155)..(156): Xaa can be any naturally occurring amino acid
VTCGKKLHRQGKNNTEPKQVPIYTKLAYILGLRVSPHHRRMGIGMKLVKKMEEWFRDNGAEYAYMATEKDNVASVKLFTDKCGYSKFRTPCILANPVFSHPARISHKVTIIELSPSDAEILYRSKFSTTEFFPRDVDSVLRNKLSLGTFLAVPKXXCTGLTR

SEQ ID NO: 606 - protein, 513 aa, Glycine max
MLPRSRTLPSRIHQGIIEERHNVRHYLQVEVRPNNTQTETEAMNIQSNYSKCFDDDGRLKRTGTFWMATAHIITAVIGSGVLSLAWAVAQLGWVAGPIVMFLFAVVNLYTSNLLTQCYRTGDSVSGHRNYTYMEAVNSILGGKKVKLCGLTQYINLFGVAIGYTIAASVSMMAIKRSNCYHSSHGKDPCHMSSNGYMITFGIAEVIFSQIPDFDQVWWLSIVAAIMSFTYSSVGLSLGVAKVAENKSFKGSLMGISIGTVTQAGTVTSTQKIWRSLQALGAMAFAYSFSIILIEIQDTIKSPPAEHKTMRKATTLSIAVTTVFYLLCGCMGYAAFGDNAPGNLLTGFGFYNPYWLLDIANLAIVIHLVGAYQVFSQPLFAFVEKWSARKWPKSNFVTAEYDIPIPCFGVYQLNFFRLVWRTIFVLLTTLIAMLMPFFNDVVGILGAFGFWPLTVYFPIDMYISQKKIGRWTSRWLGLQLLSASCLIISLLAAVGSMAGVVLDLKTYKPFKTSY

SEQ ID NO: 607 - protein, 810 aa, Glycine max
  misc_feature (1)..(1): Xaa can be any naturally occurring amino acid
XARADTELTGKIPDFIGNWSKLQTLRFQGNSFNGSIPSSFSNLSSLTELRISGLSNGSSSLEFLRNMKSLTILELRNNNISGSISSTIGELHNLNQLNLSFNNITGQNLGSIFNLSSLTYLFLGNNKFNGTLPMQKSSSLVNIDLSYNDLSGSLPSWVNEPNLQLNLVANNLDVSNASGLPIGLNCLQKIFPCNQGIGRYSDFAIKCGGNQIRSADGIVYEMDNQTLGPATYFVTDANRWAVSNVGLFTGSSNPVYKSFVSNQFTGTVNSELFQTARLSASSLRYYGLGLENGFYNITLQFAETAILDSTRSWESLGRRVFDIYIQGTRVLKDFDIQKEAGGISYKAIQRQFRFEVTENYLEIHLFWAGKGTCCIPTQGTYGPLIQAIHAIPDFIPTVSNKPPSSNNNNIGLILGIVLGVGVVSVLSIFAIFCIIRRRRRRDDEKELLGIDTKPYTFSYSELKNATNDFNLENKLGEGGFGPVYKGTLNDGRVIAVKQLSVGSHQGKSQFITEIATISAVQHRNLVKLYGCCIEGSKRLLVYEYLENKSLDQALFGKCLTLNWSTRYDICLGVARGLTYLHEESRLRIVHRDVKASNILLDYELIPKISDFGLAKLYDDKKTHISTGVAGTIGYLAPEYAMRGHLTEKADVFSFGVVALELVSGRPNSDSSLEGEKVYLLEWAWQLHEKNCIIDLVDDRLSEFNEEEVKRVVGIALLCTQTSPTLRPSMSRVVAMLSGDIEVSTVTSKPGYLSDWKFEDVSSFMTGIEIKGSDTNYQNSSGSTSMMGGVDYYSPKDVSKPILKETLWEGR

SEQ ID NO: 608 - protein, 1062 aa, Glycine max
  misc_feature (14)..(14): Xaa can be any naturally occurring amino acid
  misc_feature (16)..(16): Xaa can be any naturally occurring amino acid
  misc_feature (40)..(40): Xaa can be any naturally occurring amino acid
RNSSSDLTKLLESXGXSNGCRFLDGAGDRSRSRRTEPRRXDDPAPDAAEGEQLGEPPSSGGGSPEQTQPAPASAPQSPVVGPRLAPSYTVVNAILEKKEDGPGPRCGHTLTAVAAVGEEGTPGYIGPRLILFGGATALEGNSAATGTPSSAGNAGIRLAGATADVHWYDVLTNKWSRITPFGDPPTPRAAHVATAVGTMVVIQGGIGPAGLSAEDLHVLDLTQQRPRWHRVAVPGPGPGPRYGHVMALVGQRYLMAIGGNDGKRPLADVWALDTAAKPYEWRKLEPEGEGPPPCMYATASARSDGLLLLCGGRDANSGPLPSAYGLAKHPRGRWEWAIAPGVSPSPRYQHAAVFVNARLHVSGGALGGGRMVEDSSSVAVLDTAAGVWCDTKSVVTSPRTGRYSADAAGGDAAVELTRRCRHAAAAIGDLIFIYGGLRGGVLLDDLLVAEDLAAAETTAASHAAAAAAASNVQAGRLPGRYGFIDDRTRQTMPETDPDGSVVLGNPVAPPVNGDMYTDISTENALLPGSRRTSKGVEYLVEASAAEAEAISATLAAAKARQVNGEVELPDRDRGAEATPSGKQISSLIKPDSAGSNSIPPGGVRLHHRAVVVAAETGGALGGMVRQLSIDQFENEGRRVSYGTPESATAARKLLDRQMSINSVPKKVVAHLLKPRGWKPPVRRQFFLDCNEIADLCDSAERIFSSEPSVLQLRAPIKIFGDLHGQFGDLMRLFDEYGAPSTAGDIAYIDYLFLGDYVDRGQHSLETITLLLALKVEYPNNVHLIRGNHEAADINALFGFRIECIERMGERDGIWTWHRINKLFNWLPLAALIEKKIICMHGGIGRSINHVEQIENIQRPIPMEAGSIVLMDLLWSDPTENDSVEGLRPNARGPGLVTFGPDRVMEFCNNNDLQLIVRAHECVMDGFERFAQGHLITLFSATNYCGTANNAGAILVLGRDLVVVPKLIHPLPPAISSPETSPERHIEDTWMQELNANRPPTPTRGRPQVTNDRAVLRNSMMPFSGYSSLPAESFKDQAFICPGSHRSIIWPVDDTSSRSKQSW

SEQ ID NO: 609 - protein, 537 aa, Glycine max
VHPRYRSLLVFILASANSHLTLLLSLSFIIETSFQISQSMALHFLLLLLFAVSVVAADEEPFIGVNIGTDLSDMPHPTQVVALLKAQQIRHVRLYDADQAMLLALAKTGIQVAVTVPNEEILAIGQSNSTAANWVSRNVVAHYPATNITAICVGSEVLTTLPNAAKVLVSAIKYIHSALVASNLDRQVKVSTPLSSSIILDSFPPSQAFFNRSLNPVLVPLLDFLQSTGSYLMLNIYPYYDYMQSNGVIPLDYALFKSLPPNKEAVDSNTLLHYTNVFDAMVDAAYFAMAFLNYTNIPVVVTESGWPSKGGSNEPDATVDNANTYNSNLIKHVFNKTGTPKHPGIDVSTYIYELYNEDMKSGPLSEKNWGLFDANGTPIYILHLTESGAVLANDTSNNTFCIAKDGADPKMLQAALDWACGPGKVECSPLLQGQPCYEPDNVIAHANYAFDTYYHKMGKTPDACDFNGVATISTSDPSHGSCLFPGSVGKNGTLGNFTAPSMNSTNSDSSAYKFSCDLRIRSLLMVTGFLLWGVVLL

SEQ ID NO: 610 - protein, 486 aa, Glycine max
MVEKSSRTNLGHHQDFGMEAYSIDGVSSQSESKFYDDDGHVKRTGNVWTTSSHIITAVVGSGVLSLAWAMAQMGWVAGPVVMIFFSAVTLYTTSLLADCYRCGDPVTGKRNYTFMDAVQSILGGYYDAFCGVVQYSNLYGTAVGYTIAASISMMAIKRSNCFHSSGGKSPCQVSSNPYMIGFGIIQILFSQIPDFHETWWLSIVAAIMSFVYSTIGLALGIAKVAETGTFKGSLTGVRIGTVTEATKVWGVFQGLGDIAFAYSYSQILIEIQDTIKSPPSEAKTMKKSAKISIGVTTTFYMLCGFMGYAAFGDSAPGNLLTGFGFFNPYWLIDIANAAIVIHLVGAYQVYAQPLFAFVEKWASKRWPEVETEYKIPIPGFSPYNLSPFRLVWRTVFVIITTFVAMLIPFFNDVLGLLGALGFWPLSVFLPVQMSIKQKRTPRWSGRWIGMQILSVVCFIVSVAAAVGSVASIVLDLQKYKPFHVDY

SEQ ID NO: 611 - protein, 194 aa, Glycine max
  misc_feature (1)..(1): Xaa can be any naturally occurring amino acid
  misc_feature (149)..(149): Xaa can be any naturally occurring amino acid
XFYSSLRMQFGKLGEMIAAHTRLKEHSKFLFIPGPDDAGPSNVLPRCALPKYLTEELQKHIPNAIFSSNPCRVKFYTQEIVFFRQDMLYRMRRSCLMPPSTEETCDHFEHLVATITHQSHLCPLPLTVQPIIWNYDHCLYLYPLPHTIXLGDRSQQKAFKYTGITCFNTGSFAIDNTFVAYRPCSQEVELSALP

SEQ ID NO: 612 - protein, 763 aa, Glycine max
MWKLKIAEGGDGLISVNNFIGRQHWEFDPNAGTPQERAQVERVREEYKKNRFCIKQSGDLLMRMQLTKENTCGPILARVNVKDTENVTEEALITTMRKAINFYSSIQAHDGHWPAESAGPLFFLQPLVMALYITGSLNDVLGPEHQMEIIRYLYNHQNEDGGWGLHIESHSTMFGSALSYIALRILGEGPEDGEDRAMARGRKWILDHGGLEAIPSWGKFWVTVLGVRLESGCNPLPPEIWLLPKYAPIHPGKMLCYCRLVYMPMSYLFGKRFVGPITGLIISLREEMYNQPYDQIDWNNARSTVAKEDLYYPHPLIQDMLWASLHHVAEPLLNCWPFSMLREKALEVAIDHIRYEDENSGYLCIGSVEKVLCLIARWVEDPNSEAYKLHLARIPDYFWLAEDGLKIQSLGSQLWDATLAIQAIISCDLSEEYGPTLRKAHHFVKASQVLENPSGNFKAMHRHISKGAWTFSMQDQGWQVSDCTAEGLKAALLLSQMSPDLIGEKMEDERFYDAVDVILSLQSGNGGFPAWEPQRAYRWLEKFNPTEIFKDTLIEMEYVECTSSALQGLALFRKLYPKHRRKEVDLCISKAIRYIEKTQNPDGSWFGCWGICYTYGTLFSVKGLTDCGKNYRNSPALRKACKFLLSKQLPNGGWGESYLSSQNKVYTNLKGNRANLVQTSWALMSLIDAGQVEIDPTPVERGIRLLINSQMEDGDFPQQEITGVFMRNCTLNYSSYRNIFLIWALGEYRRRVFTHKSQILSST

SEQ ID NO: 613 - protein, 681 aa, Glycine max
MSGGGCSIVWFRRDLRVEDNPALAAGVRAGAVVCVFIWAPEEEGQYYPGRVSRWWLKQSLAHLDSYLRNLGSPLITKRSTNSISSLLEVVKSTGATQLFFNHLYDPLSLVRDHRAKEVLTAQGITVRSFNSDLLYEPWDVNDAHGQPFTTFSAFWERCLSMPYDPQAPLLPPKRIIPGDVSRCPSDTLVFEDELEKASNALLGRAWSPGWSNADKALTAFVNGALIEYSKNRRKADSATTSFLSPHLHFGEVSVKKVFHLVRIKQVFWANEGNKAGEESVNLFLKSIGLREYSRYISFNHPYSHERPLLGHLKFFPWVVNEGYFKAWRQGRTGYPLVDAGMRELWATGWLHDRIRVVVSSFFVKVLQLPWRWGMKYFWDTLLDADLESDALGWQYISGTLPDGREIDRIDNPQFEGYKCDPNGEYVRRWLPELARLPTEWIHHPWNAPESVLQAAGIELGSNYPLPIVGIDAAEVRLQEALIQMWQQEAASRAAMENGTEEGLGDSSESAPIAFPQDIQMEERPEPVRNNPPHGTRRYQDQMVPSITSSHVRVEEEETSSDLRNSAADSRAEVPINVTTQQNARETVNQGVLLNTNRNTRVQNNPTTWLRNAAEDSTAESSSSTRRERDGGVVPVWSPPASNFSEQFVDDENGIGTGSSYLQRQHPQSHQLMNWTRLPQTG

SEQ ID NO: 614 - protein, 259 aa, Glycine max
  misc_feature (259)..(259): Xaa can be any naturally occurring amino acid
VFFTKFVREIYTMAKHFLLLLFAVCVAAIDEEPFIGVNIGRDLSDMPHPTQVVALLKAQQIRHVRLYDADQAMLIALANTRIQVAVSVPNQEILAIGQSNTTAAKWVSHNVIAHYPSTNITTICVGSEVLTTLPYAAKVLVSALKFLHSALVASNLDHQIKVSTPLSSSMILDSFPPSQAFFNRSLNPVLVPMLDFLQTTDSYLMLNIYPYYDYMQSNGVIPLDYALFKPLPPNKEAIDSNSLLHYSNVFDAAVDAAYX

SEQ ID NO: 615 - protein, 219 aa, Glycine max
  misc_feature (162)..(162): Xaa can be any naturally occurring amino acid
  misc_feature (168)..(168): Xaa can be any naturally occurring amino acid
MDLKSAKDEDTEVDLESGLVLTDDESSEDRYSGFCKESKLTVVSMDMVKVTNKLYSVEYAENNTPEEGKRKKCSNKKCPKPPRPPRAPSLDAADQKLIREITELAMLKRARIERMKALKKMKAAKASSSSSSSTFAMVFTVVFCIVVLLQGMSSGKSSVTIXSRDHLXPAGVMEGGLIDVQHQLNPSSSDSNAPGLEPHKIVQQVTGLDLPAQLRRGAG

SEQ ID NO: 616 - protein, 214 aa, Glycine max
  misc_feature (208)..(208): Xaa can be any naturally occurring amino acid
  misc_feature (214)..(214): Xaa can be any naturally occurring amino acid
MAVLMIFHMFAAIALPAYGDAFIGVNIGTDATNMPSPTEVVALLKAQGIQHVRLYDADRAMLRTLANTGIRVIVSVPNDQILGIGQSNATAANWVARNVIAHVPATNITAIAVGSEVLTSLPNAAPVLVSALKFIQAALVAANLDQQIKVSTPHSSSVILDSFPPSQAFFNKTWDPVMVPLLNFLQSTGSYLMLNVYPYYDYMQTNGXVPLDYX

SEQ ID NO: 617 - protein, 395 aa, Glycine max
  misc_feature (46)..(47): Xaa can be any naturally occurring amino acid
  misc_feature (393)..(393): Xaa can be any naturally occurring amino acid
  misc_feature (395)..(395): Xaa can be any naturally occurring amino acid
AFTLLLPRSKPRPDGCEDDRRGVAEKRIGFCYGEARSRERSGPSLXXQPNNNRPKPKPKRFVKNQIPDSILNNPLLSAAISVLPSNYNFEVHKCVWRVLSTGAKRVALQFPEGLLMYSLPLSDIFTTFAGVTHCFVLADVTYGACCVDDLAASALGADLLIHYGHSCLVPIDATTIPCLYVFVDIKIDVPHFVDTLSLNLLAQTKTLVVAGTIQFASAIRAAKPQLEELGFRVLIPQSKPLSAGEVLGCTAPKVSRRNCCESSVLVFVADGRFHLEAFMIANPGIRAFRYDPYMGKLFLEEYDHLGMKRSRKNAIFKAREEARSWGLVLGTLGRQGNPRILERLEKMMRDRGFDYTVVLMSEMSPTRIALFEDSLDAWIQIACPRLSIASCRXFX

SEQ ID NO: 618 - protein, 331 aa, Glycine max
  misc_feature (277)..(277): Xaa can be any naturally occurring amino acid
  misc_feature (284)..(284): Xaa can be any naturally occurring amino acid
  misc_feature (323)..(323): Xaa can be any naturally occurring amino acid
  misc_feature (331)..(331): Xaa can be any naturally occurring amino acid
MSGGGCSSIVWFRRDLRIEDNPALTAGVRAGAVVAVFIWAPEEEGQYYPGRVSRWWLKNSLAHLDSSLRNLGTPLITKRSTDTLSSLFEVVKSTGATQLFFNHLYDPLSLVRDHRAKEVLTAQGITVRSFNADLLYEPWDVNDAHGRPFTTFAAFWERCLSMPYDPESPLLPPKRIIPGDASRCPSDTLLFEDELEKASNALLARAWSPGWSNANKALTTFINGPLIEYSKNRRKADSATTSLLSPHLHFGELSVKKVFHLVRIKQVLWANEGNKAXGEESVNXLFLKSIGLTEYSKGTISFNPPPTRQRPFSKAHLYFPWGXVKPKGYFX

SEQ ID NO: 619 - protein, 110 aa, Glycine max
  misc_feature (104)..(105): Xaa can be any naturally occurring amino acid
MSGGGCSSIVWFRRDLRIEDNPALTAGVRAGAVVAVFIWAPEEEGQYYPGRVSRWWLKNSLAHLDSSLRNLGTPLITKRSTDTLSSLFEVVKSTGATQLFFNHXXEPLAL

SEQ ID NO: 620 - protein, 542 aa, Glycine max
  misc_feature (58)..(58): Xaa can be any naturally occurring amino acid
  misc_feature (60)..(61): Xaa can be any naturally occurring amino acid
  misc_feature (174)..(174): Xaa can be any naturally occurring amino acid
  misc_feature (234)..(234): Xaa can be any naturally occurring amino acid
MALTLRSSTSFINQKETKVLKTSDNAPAIVSFSKFKPSSSLFRLRAKNSMARSSSHSXEXXEKVLAPSVAHSHNDSKRVPVYVMLPLDTVTMGGSLNKPRAWNASLMALKSAGVEGVMVDAWWGLVEKEGPLKYNWEPYAELVQMLQMHGLKLVKNISFYLSIVLFIFCFSISXLPPWVLEEISKNPELVYTDRSGRRNPEYISLGCDSVPVLNGRTPLQVYSDYMRSFRDQFXDYLGSVIVEIQLGMGPCGELRYPSYPETNGTWRFPGIGEFQCYDKYMKASLAAAAEDIGKKEWGGGGPHDSGQYNQFPEDTGFFKREGTWNTEYGQFFLEWYSGGLLEHGERILVSAKGIFETTGVKLSGKVAGIHWHYRARSHAAELTAGYYNTRNNDGYLPIARMLAKHGVVFNFTCMEMKDREQPDFANCSPEGLVHQVKMATTTARAELAGENALERYDADAYAQVLSTSKSESGSGLAAFTYLRMNKRLFEADNWRHLVDFVRSMSEGGRRERLPAADSHGSDLYVGHIKATQEKHTQEAALV

SEQ ID NO: 621 - protein, 510 aa, Glycine max
  misc_feature (179)..(179): Xaa can be any naturally occurring amino acid
  misc_feature (221)..(222): Xaa can be any naturally occurring amino acid
  misc_feature (248)..(248): Xaa can be any naturally occurring amino acid
  misc_feature (506)..(506): Xaa can be any naturally occurring amino acid
MGMMNVSIAGLDSQMAAERAVDVIGQGYDLCSDIRFSACKNRLIEIEKTQSRDLVFPGGVVVKNVPNSIKCDKGERTRFHSDVLPFNQMSEHFNKQISLSGKIPSGQFNIMFNMKKCWPTDAASTKNLAYDGWFITLYNVELDRTNITLSESVKKEVPCSWNPATFGEFIEKFGPKLIXGVPMGGKDVVHIKQTKNSDLQQAELQKLLKQLADERFSEASXXHSSNVDPADKSRKIKDNCAKMWGFKXRFLLLAGLTSHSKNDDIVSISVRRGGIDNGQSYSQWLSTISQSPSVISMSFVPITSLLNSVPGNGFLSHAVNLYLRYKPAIEELHQFLEFQLPRQWAPMYDDLPLGFGHKYKKSMSPSLQFTLMGPKLYVNTVKVDSGNRPVTGIRLYLEGKKSDHLAIHLQHLSEVPGALEISEDHGYDPVDEPEERGYYEPVKWSMFSHVYTAPVQYSSSRMDESTAIVTKAWFEVKLVGMKKVLFLRLGFSTVTSATIRRSKWDXDLQP

SEQ ID NO: 622 - protein, 126 aa, Glycine max
  misc_feature (126)..(126): Xaa can be any naturally occurring amino acid
MRNNKPQLWLSLSLIITCFSFHTSLAVTTISANQSLSGDETLVSQHGNFELGFFNTGNNSNKFYIGMWYKKISQRTYVWVANRDQPVSDKNSAKLTILEGNLVLLDQSQNLVWSTNLSSPSSGSAX

SEQ ID NO: 623 - protein, 278 aa, Glycine max
  misc_feature (1)..(1): Xaa can be any naturally occurring amino acid
  misc_feature (4)..(4): Xaa can be any naturally occurring amino acid
  misc_feature (20)..(20): Xaa can be any naturally occurring amino acid
  misc_feature (171)..(172): Xaa can be any naturally occurring amino acid
XALXFQNSSVSCSAFDFHSXYLYELDQHLDRFLRSASMSKIDPPFDRGSIRRILIQTVSASKCRKGSLRYWLSAGPGDFQLSPSCCHRSSLYAIVIQDLSPSSPNFRGVKVVTSSIPIKHPKFAITKSVNYLPNVLSKVEAEEAGAFVGIWLDGEGFVAEGPNMNVAFVTXXDKELIMPHFDKILSGCTAKRVLTLAESLLREGKLKGIRVKTVTVEEGKQADEMMLLGSGVLVCPVVQWDEQVIGDGKEGPITQALLNLIVEDMKSGPSTVRIPVPY

SEQ ID NO: 624 - protein, 144 aa, Glycine max
  misc_feature (1)..(1): Xaa can be any naturally occurring amino acid
XVTVEKLDVIDAFYCVCSTITTLGYGDQSFSTQAGRIFAVFWILTGTITLAQLFVYIAELNTEIRQKELVKWVLTRKVTNLDLEAADLDEDGTVGAAEFVIYKLKEMGKISQEDISLVMQEFEQLDVDDSGTLSTSDITLAQSS

SEQ ID NO: 625 - protein, 110 aa, Glycine max
  misc_feature (1)..(1): Xaa can be any naturally occurring amino acid
XRIFAVFWILTGTITLAQLFVYIAELNTEIRQKELVKWVLTRKVTNLDLEAADLDEDGTVGAAEFVIYKLKEMGKISQEDISLVMQEFEQLDVDDSGTLSTSDITLAQSS

SEQ ID NO: 626 - protein, 350 aa, Glycine max
  misc_feature (55)..(55): Xaa can be any naturally occurring amino acid
  misc_feature (133)..(133): Xaa can be any naturally occurring amino acid
  misc_feature (152)..(152): Xaa can be any naturally occurring amino acid
  misc_feature (227)..(227): Xaa can be any naturally occurring amino acid
  misc_feature (284)..(284): Xaa can be any naturally occurring amino acid
  misc_feature (293)..(293): Xaa can be any naturally occurring amino acid
  misc_feature (326)..(326): Xaa can be any naturally occurring amino acid
  misc_feature (339)..(341): Xaa can be any naturally occurring amino acid
MDIAALLTSAGINIAVCVVLFSFYSVLRKQPSNVNVYFGRRLASQHSRRIDPAWXRFVPSPSWILKAWETSEDEILAIGGLDAVGFVRILVFSIRVFSIAAVICTILVLPVNYHGMDRMYKNIPLESLEVFTXLENVKEGSKWLWAHCLALXYIITLSACALLYFEYKSITNLRLLHIIGSPPNPSHFTILVRSIPWSSVESYCETVKKFFSYYHASTYLSHQMVYXAGKGQKPKDDAEHMCEGIRDAPMERTCKPSFMQCCCSGAPTISFKKISTEMGSTHGXELATLTWIXIQEKRDGPLLLGFFKSGMLALTAAQVLQTSNPXVWVTDVAPEPMMXXXSNICIPYRH

SEQ ID NO: 627 - protein, 952 aa, Glycine max
MVSGNIFHCRKNSWPPQEYISKSTLQLFDYDSSAPPEQAWRRRLNSHANLLKEFRVTFTEAIKMVRLGIRIWSYVREEASHGRKAPIDPFTRESCKPSASQGVPLGGMGSGSISRGFRGEFRQWQIIPSLCEASPVMANQFSIFISREGGNKNFASVLAPGQHEGLGSSRKPDDQGISSWGWNLSGQHSTYHALFPRAWTVYDGEPDPELKISCRQISPFIPHNYRESSLPAAVFVYTLVNTGKERAKVSLLFTWANSIGGSSHSSGDHVNEPFKAEDGVSGVLLYHKTAKGNPPVTFAIAACETQNVNVSVLPSFGLSEESSMTAKHMWSKMVKDGQFDQENFNSGPSMPSSPGETLCAAVAASTWVEPHGKCTVAFSLAWSSPKVKFVKGSTFNRRYTKFYGTSEKAAADLAHDALTHYNRWEEEIEKWQNPVLKDEALPEWYKFTLFNELYFLVAGGTIWIDSPVLSSNMRNDQDRVRELESAVVKETEDKMSDRKRTVVESTTDSTYDSAVITGHDRADEKLYEDDDDVGRFLYLEGVEYIMWCTYDVHFYASFALLELFPRIELNIQRDFARAVLCEDGRKVKFLAEGNWGIRKVYGAVPHDLGTHDPWHEMNAYNIHDTSKWKDLNPKFVLQVYRDFATTGDLQFGVDVWPAVRAAMEYMEQFDRDGDGLIENDGFPDQTYDTWTVHGVSTYCGCLWLAALQAAAVMALELGDREFAETCKRKFLKAKPAFEEKLWNGTYFNYDSGSSGNSKSIQADQLAGQWYTASSGLPSLFEDSKIKSALRKVYDFNVMKVKGGRMGAVNGMHPNGKVDETCMQSREVWTGVTYGLAATMIHAGMEEEAFTTAEGIFLAGWSEDGYGYWFQTPEAWTMDGHYRSLMYMRPLAIWGMQYAINRPKAILEAPKINIMDRIHLSPVIGGYSHNETGVRKIATKAGCFSNSVFNCAC

SEQ ID NO: 628 - protein, 786 aa, Glycine max
  misc_feature (1)..(1): Xaa can be any naturally occurring amino acid
  misc_feature (331)..(331): Xaa can be any naturally occurring amino acid
XERERERERERERERERERERERERERSLCNIYNTSEDELRKTMEKANNVIADILKKQPCLASECDTGNLENIDKDGLTYFKDLMEESSLPSSLNMLEKDYDYMIRNKSELDERLFINEDDSLLASVSLSGGSVSVGGVKRKFDSMASPAKTITSPLSPHRSPASHANGIPGSANSKMAATPVSTAMTTAKWLRTVISPLPSKPSPELERFLTSCDRDVTSDVVRRAQIILQAIFPSSPLGERCVTGSLQSANVVDNIWAEQRRLEALKLYYRVLEAMCRAEAQVLHATNLTSLLTNERFHRCMLACSAELVLATHKTVTMLFPAVLERTXGITAFDLSKVIESFIRHEESLPRELRRHLNSLEEPTRPRLLESMVWEKGSSMHNSLAVARPSLSAEINRLGLLAEPMPSLDEIAMHINFSCGGLPPVPTLPKLESSPTQNGDIRSPKRNVLMERNSFTSPVKDRLLPFNSLKSKLPPPPLQSAFASPTKPNPGGGGETCAETGINIFFGKIIKLGAVRISGMVERLQLSQQIRENVYCLFQRILNQWTSLFFNRHIDQIILCCFYGVAKISQLNLTFKEIVYNYRKQPHCKPQVFRSVFVDWSLARRNGRTGQEHIDIITFYNEIFIPSVKPLLVELGPAGPTTKSDRIPEVNKNDGHLAQCPGSPKISPFPTLPDMSPKKVSATHNVYVSPLRSSKMEALISHSSKSYYACVGESTHAYQSPSKDLTAINNRLNGNRKVRGPLNFDDVDFGLVSDSMVANSLYLQNGSCASSSGAPFKSEQPDS

SEQ ID NO: 629 - protein, 603 aa, Glycine max
  misc_feature (1)..(1): Xaa can be any naturally occurring amino acid
  misc_feature (560)..(560): Xaa can be any naturally occurring amino acid
XPGDPLQSTCRLELKCFMATKTESNKVAGNAILYECVQTIMSIEDNGGLRVLAINILGRFLSNRDNNIRYVALNMLMKAVTADAQAVQRHRATIIECVKDSDASIRKRALELVYVLVNETNVKPLAKELIDYLEVSDLDFREDLTAKICSIVAKYSPEKIWYIDQMLKVLSEAGNFVKDEVWYALVVVISNASELHGYTVRALYRAFQTSAEQETLVRVTVWCIGEYGDMLVNNVGMLDIEDPITVTESDAVDVIEIAIKRHASDLTTKAMALVALLKLSSRFPSCSERIKEIIVQFKGSFVLELQQRAIEFSSIISKHQNIRSTLVERMPVLDEATYIGRRAGSLPGAASTPTAPSFNLPNGVAKPVAPLVDLLDLSSDDAPAPSSSGGGDILQDLLGVDLSPASQQSVAGQASKSGNDVLLDLLSIGSPSAESSSSTVDILSSNSSNKAPVSSSLDGLSSPAPMMNLLDGFAPSPPTENNGSVYPSVTAFESSSLRLTFNFSKQPGNPQTTVIQATFMNLSSNSYTDFVFQAAVPKFLQLHLDPASSNTLPANGSITXQSLKITNSQHGKKSLVMRIRIAYKINGKDTLEEGQVNNFPHGL

SEQ ID NO: 630 - protein, 338 aa, Glycine max
  misc_feature (1)..(2): Xaa can be any naturally occurring amino acid
  misc_feature (93)..(93): Xaa can be any naturally occurring amino acid
XXEVSHMFSSNTAAFPDSLAIAKEGELTIGTIDDIQKLHIRSIPLGEHARRICHQEQSRTFAICSLNNPASGEDSEMHFVRLLDDQTFEFISXEYGCFIISCSFSDDNNVYYCVGTAYVLPEENEPTKGRILVDPRVRGKLQLIAEKETKGAVYCLNAFNGKLLAAINQKIQLYKWVLRDDGTHELQSECGHHGHILALYVQTRGDFIVVGDLMKSISLLIYKHEEGAIEERARDYNANWMSAVEIVDDDIYLGAENSFNLFTVRKNSEGATDEERGRLEVGGRVAFPFSKKKKKKKKKKKKKKKKKKKKKKKKKKKKKKKKKKKKKKKKKKKKKGRP

SEQ ID NO: 631 - protein, 598 aa, Glycine max
  misc_feature (1)..(1): Xaa can be any naturally occurring amino acid
XNVATANATQVLLATGGGHLVYLEIGDGILQEVKHAQLEYEISCLDINPIGENPNHSNLAAVGMWTDISVRIFSLPDLSLITKEQLGGEIIPRSVLLCAFEGISYLLCALGDGHLLNFMLNTSTGELTDRKKVSLGTQPITLRTFSSKNTTHVFAASDRPTVIYSSNKKLLYSNVNLKEVSHMCPFNSAAFPDSLAIAKEGELTIGTIDDIQKLHIRSIPLGEHARRICHQEQSRTFAICSLNNPASGEDSEMHFVRLLDDQTFEFISTYSLDTYEYGCFIISCSFSDDNNVYYCVGTAYVLPEENEPTKGRIIVFAVEDGKLQLIAEKETKGAVYCLNAFNGKLLAAINQKIQLYKWVLRDDGTHELQSECGHHGHILALYVQTRGDFIVVGDLMKSISLLIYKHEEGAIEERARDYNANWMSAVEIVDDDIYLGAENSFNLFTVRKNSEGATDEERGRLEVVGEYHLGEFVNRFRHGSLVMRLPDSDVGQIPTVIFGTINGVIGVIASLPHEQYVFLEKLQSNLRKVIKGVGGLSHEQWRSFNNEKKTVEARNFLDGDLIESFLDLNRSKMDEISKAVDVSVEELCKRVEELTRLH

SEQ ID NO: 632 - protein, 513 aa, Glycine max
MLPRSRTLPSRIHQGIIEERHDVRPYVQVEVRPNNIQTETQAMNIQSNYSKCFDDDGRLKRTGTFWTATAHIITAVIGSGVLSLAWAVAQLGWVAGPVVMFLFAVVNLYTSNLLTQCYRTGDSVNGHRNYTYMEAVKSILGGKKVKLCGLIQYINLFGVAIGYTIAASVSMMAIKRSNCYHSSHGKDPCHMSSNGYMITFGIAEVIFSQIPDFDQVWWLSIVAAIMSFTYSSVGLSLGVAKVAENKTFKGSLMGISIGTVTQAGTVTSTQKIWRSLQALGAMAFAYSFSIILIEIQDTIKSPPAEHKTMRKATTLSIAVTTVFYLLCGCMGYAAFGDNAPGNLLTGFGFYNPYWLLDIANLAIVIHLVGAYQVFSQPLFAFVEKWSVRKWPKSNFVTAEYDIPIPCFGVYQLNFFRLVWRTIFVLLTTLIAMLMPFFNDVVGILGAFGFWPLTVYFPIDMYISQKKIGRWTSRWIGLQLLSVSCLIISLLAAVGSMAGVVLDLKTYKPFKTSY

SEQ ID NO: 633 - protein, 489 aa, Glycine max
  misc_feature (92)..(93): Xaa can be any naturally occurring amino acid
  misc_feature (137)..(137): Xaa can be any naturally occurring amino acid
MSSTTQNRRSSFTPSTASSLAKAKRHPSSVSSSSSATQNLAVKRAPLANLTNQRNAPYSSSSSSCSNKVAKTKKDSKSTISGNKSSQLKSVXXSSSVVIPKANSLSQKKDAAPTVATFAVPVRSVDVSPSKSDGRVXVSMDETTSSCDSIKSPDEVEYLDNRDVSDVDSIQKKIISNLNISDTTEPEGNVCSREIIVELEERVDKIVNIDNIYSDTQLCATYVCDIYKHLRESEEKKRPSTDFMDTIQKDINVSMRAILVDWLVEVAEEYRLVPETLYLTVNYLDRYLSGNAMNRQRLQLLGVSCMMIASKYEEICAPQVEEFCYITDNTYLKEEVLQMESAVLNYLKFEMTAPTVKCFLRRFVRAAAHDVQEIPSLQLEYLTNFIAELSLLEYSMLSYPPSLIAASVIFLARFILFPSKKPWNSTLQHYTLYRPSDLCACVKDLHRLCCSSHDSNLPAIRDKYSQHKYKCVAKKHIPPSIPREVFQIN

SEQ ID NO: 634 - protein, 192 aa, Glycine max
MRFMPLSRLIFRLPRHYTHGPLQSRALQTDSVLKDPQAKPIKYKIPQFYDPYGPRPPPSEKIVQLAEQIEALSEEERGQIMPTLSERLKLPKLQPISTDGMDMGTEGGGAAGLKVEEKKAEKTAFDVKLEKFDAAAKIKVIKEVRAFTNLGLKEAKDLVEKVPVVLKQGVTKEEANEIIEKIKAAGGVAVME

SEQ ID NO: 635 - protein, 681 aa, Glycine max
  misc_feature (1)..(1): Xaa can be any naturally occurring amino acid
  misc_feature (16)..(16): Xaa can be any naturally occurring amino acid
  misc_feature (28)..(28): Xaa can be any naturally occurring amino acid
  misc_feature (316)..(316): Xaa can be any naturally occurring amino acid
XINKVYYSCLVKAMPXNRIFLQSLSGIXDQIIYKIKLPGPAILGEGKPENQNHAIIFPRVRGLQTIDMNQDNYMEEALKMRNLLQEFLKKHDGVRFPSILGLREHIFTGSVSSLAWFMSNQETSFVTIGQRLLANPLKVRFHYGHPDVFDRLFHLTRGGVSKASKVINLSEDIFAGFNSTLREGNVTHHEYIQVGKGRDVGLNQISMFEAKIANGNGEQTLSRDVYRLGHRFDFFRMLSCYFTTVGFYFSTLITVLTVYVFLYGRLYLVLSGLEEGLSTQKAIRDNKPLQVALASQSFVQIGVLMALPMLMEIGLXERGFRTALSEFILMQLQLAPVFFTFSLGTKTHYFGRTLLHGGAKYRPTGRGFVVFHAKFADNYRLYSRSHFVKGIELMILLVVYEIFGHSYRSTVAYILITASMWFMVGTWLFAPFLFNPSGFEWQKIVDDWTDWNKWISNRGGIGVLPEKSWESWWEEEQEHLQYSGMRGIIVEILLSLRFFIYQYGLVYHLNITKKGTKSFLVYGISWLVIFVILFVMKTVSVGRRKFSANFQLVFRLIKGMIFLTFVSILVILIALPHMTVQDIVVCILAFMPTGWGMLQIAQALKPVVRRAGFWGSVKTLARGYEIVMGLLLFTPVAFLAWFPFVSEFQTRMLFNQAFSRGLQISRILGGQRKERSSRNKE

SEQ ID NO: 636 - protein, 488 aa, Glycine max
  misc_feature (104)..(104): Xaa can be any naturally occurring amino acid
  misc_feature (147)..(147): Xaa can be any naturally occurring amino acid
  misc_feature (475)..(475): Xaa can be any naturally occurring amino acid
  misc_feature (477)..(477): Xaa can be any naturally occurring amino acid
WDFSFEPPEMDKKEHIAIFTTASLPWLTGTAVNPLFRAAYLAKSGERDVTLVIPWLSLKDQRLVYPNNITFASPSEHEKYICQWLEERVGFTSGFSIQFYPGKXFSRDKRSILAVGDISEIIPDEDAAIAVLEEPEDLTGYHHGEKXWKTKFRLVIGIIHTNYLEYVKREKNGVMQAFLLKYLNNWVVSIYCHKVIRLSAATQDYTGSIICNVHGVNPKFLEIGNTAARRRQKGEHAFTKGAYFIGKMIWSKGYKELLQLLKDHEKELSALEVDLFGSGEDSDEVQKAAEKLELAVRVHPARDHADALFHDYKLFLNPSTTDVVCTTTAEALAMGKIVVCANHPSNDFFKQFPNCWTYDDDDGFVKLTLKALAEQPAQPTDAQRHDLSWEAATKRFLKAADLDKPLERKLSRTTSNFLAASLNLQEKVDEASAYVHHVASGFEVSRRIFGAIPDSLQPDEELRKELGLTDASTKXSXRKMMLECCDVN

SEQ ID NO: 637 - protein, 736 aa, Glycine max
  misc_feature (1)..(1): Xaa can be any naturally occurring amino acid
  misc_feature (267)..(268): Xaa can be any naturally occurring amino acid
  misc_feature (301)..(302): Xaa can be any naturally occurring amino acid
  misc_feature (318)..(318): Xaa can be any naturally occurring amino acid
  misc_feature (325)..(325): Xaa can be any naturally occurring amino acid
  misc_feature (356)..(356): Xaa can be any naturally occurring amino acid
  misc_feature (376)..(376): Xaa can be any naturally occurring amino acid
  misc_feature (384)..(384): Xaa can be any naturally occurring amino acid
  misc_feature (470)..(471): Xaa can be any naturally occurring amino acid
  misc_feature (489)..(490): Xaa can be any naturally occurring amino acid
  misc_feature (647)..(648): Xaa can be any naturally occurring amino acid
XSNASGTGTVAVAAAAAAAAPTMSFSYPNMPGNETPYLAILQNNAYSFPIPAHVGGPPGYRGTPHAPFPFFNGSFYSSQMLHPSQIQQQQLPAQSQQQSQQGHQNASMSSGSSTSQKQHAQNQQQKPNNNATGSNGGGSLQGFPVTKNPPSLPLQLQQQQPQQRAESSSEMGGEDSPSTADSRLARATIIYGQNFAMPMQSPNFALMTPASISAAGSNGGHGEKKQPQQHPGPKAGGETAPAFAMSFASMNGAPGLDLSSIAQNPSXXMPSNHNYHIMAAAQAASAQLKKSYHAAEEGKNXXVNSSNLDEDRKAISAXKNSGNNXGQSIAFGRPEVSDPSLASLSGGNNVIDTSGXRNLNLGSASSRASTSVMPAXHQHQSSQXSQQQMQRNQQQQQILQHQKQNQFAAAAAAAARNKTPSTSNGSVYSDNLPSTSSMANKFPSAVSAFPQSLVQSSNTVAQSPQWKNSXXRATTTSQSPPSMASTTPXXSSVKNLPQQQARSQQPHTQISFATNPKSSAAQVQPSSSTQSPSPPVMVGSPTTSSMSKNTGSPRTTSASTTNNKISQSSSLSSQQAKNSSAVPARKSSPVGSRNVPSILNVPQLTPSSKQQPQQQIPKQALQQAQLLFSSPYVHPQSNSTTSTTTVXXSGYYLQHQQRRGPEQMQRPGSSPAVNNVKGSSALPTQGLLHPAQVAAMQPSGSHPQFVPTGFSYASYHVHSVPSVQVKPAEQKQPAGE

SEQ ID NO: 638 - protein, 589 aa, Glycine max
  misc_feature (227)..(228): Xaa can be any naturally occurring amino acid
  misc_feature (255)..(255): Xaa can be any naturally occurring amino acid
LERQRTLNWGGPLSSFFCHASWLQLQPAKTNNGNNPRITREEIQTTIAKAVELRALHTALKQGSSPGTNNARFPSPGTNNARFPSPSPASHFSAQDYPVFTPSYEDEAHQNSTRSRTISESCDENGVEGGENSMTPSDYKEKSNSRKGLPFGFGNLDSHMCPADDDTKSPPRNYFKSRRTNSLGDSKQPLSSCNRCNPAVITSEYENTRNNKSSNIVVPLTDSHASXXQTQPRSKGLISWLFPRLKKKHNKNVSXPQSRTESEEVSQVLKDMGMSVEALKRELMDANESRDAALVEVSEMRSSLGELKQKLEYLESYCEELKKALRQATEKLNSPPQRGTPPFDGNGENLMPVGEDVMVEGFLQIVSESRLSVKQFCKTLICQIEETDHSLMDNLNLLLQPYKLSLNSKYSKAVLYHFEAFINQSFYQDFENSVFQKNGCTKFLDPRQDRQAQFSSFVALRNLSWSEVLRKGTKYYSEEFSKFCDQKMSCIITTLNWTRPWPEQLLQAFFVAAKCIWLLHLLAFSFNPPLGILRVEENRSFDPHYMEDLVTDRQRSQGPSRVKIVVVPGFYVQDMILRCRVICRHKSAP

SEQ ID NO: 639 - protein, 461 aa, Glycine max
  misc_feature (438)..(438): Xaa can be any naturally occurring amino acid
KKTSPKTHTPTSKTMSSSEFQDPAAAASSEAQVSKKAAKKEAAKLEKLRRRQEIATASAATANLSVDEEDPLGGNYGDVPLVELQSKTSADVGEWTRVEALGGALENRSVLIRGRAQAIRPVGKKMAFLVIRENGFTVQCLVQAQPDTVSAQMVKFAAALSRESIVDVEGVVSVPTAPIKGATQQVEIQVRKLYCVSRAVPTLPINLEDAARSEVEIEKALQAGEQLVRVNQDTRLNFRVLDVRTPANQGIFRIQSQVGNAFRQFLVSQGFCEIHTPKLIAGSSEGGAAVFRLDYKGQPACLAQSPQLHKQMSICGDFGRVFEIGPVFRAEDSYTHRHLCEFTGLDVEMEIKKHYFEVMDLVDRLFVAMFDSLNQNCKKDLEAVGSQYPFEPLKYLRTTLRLTYEERIQMLKDVGVQIEPYGDWNTETEMKIGHLVSXKYETRGYILQPRPMDGRTLCTVP

SEQ ID NO: 640 - protein, 541 aa, Glycine max
  misc_feature (1)..(1): Xaa can be any naturally occurring amino acid
XSSRKFSTDYNRWEEEIEKWQNPILKDETLPEWYKFTLFNELYFLVAGGTIWIDSPVLSSNMRNDQDRVRELESAVVKETEDKMSDRKRTVVESTTDSTYDSAVITGHDRADEKLYEDDDDVGRFLYLEGVEYIMWCTYDVHFYASFALLELFPRIELNIQRDFARAVLCEDGRKVKFLAEGNWGIRKVYGAVPHDLGTHDPWHEMNAYNIHDTSKWKDLNPKFVLQVYRDFATTGDLEFGVDVWPAVRAAMEYMEQFDRDGDGLIENDGFPDQTYDTWTVHGVSTYCGCLWLAALQAAAAMALDLGDREFAEKCKRKFLKAKPAFEEKLWNGTYFNYDSGSSGNSKSIQADQLAGQWYTASSGLPPLFEDSKIKSALRKVYDFNVMKVKGGRMGAVNGMHPNGKVDETCMQSREVWTGVTYGLAATMILAGMEEEAFATAEGIFLAGWSEDGYGYWFQTPEAWTMDGHYRSLMYMRPLAIWGMQYAINRPKAILEAPKINIMDRIHLSPVIGGYSHNETGVRKITTKARCFNNSVFHCAC

SEQ ID NO: 641 - protein, 540 aa, Glycine max
MALTLRSSTSFINQKETKVLKTSDNAPAIVSFSKFKPSSSLFRLRAKNSMQEAHHTREKWEKVLAPSVAHSHNDSKRVPVYVMLPLDTVTMGGSLNKPRAMNASLMALKSAGVEGVMVDAWWGLVEKEGPLKYNWEPYAELVQMLQMHGLKLQVVMSFHQCGGNVGDNCSIPLPPWVLEEISKNPELVYTDRSGRRNPEYISLGWDSVPVLNGRTPLKLNCAYKISFLNKLNVLKSILLQEIQLGMGPCGELRYPSYPETNGTWRFPGIGEFQCYDKYMKASLAAAAEDIGKKEWGGGGPHDSGQYNQFPEDTGFFKREGTWNTEYGQFFLEWYSGKLLEHGERILVSAKGIFETTGVKLSGKVAGIHWHYRARSHAAELTAGYYNTRNNDGYLPIARMLAKHGVVFNFTCMEMKDREQPDFANCSPEGLVHQVKMATTTARAELAGENALERYDADAYAQVLSTSKSESGSGLAAFTYLRMNKRLFEADNWRHLVDFVRSMSEGGRRERLPAADSHGSDLYVGHIKATQEKHTQEAALV

SEQ ID NO: 642 - protein, 490 aa, Glycine max
SLTWVCVSHSKMMENGGKQTFEVSNDTLQRVGSKSFDDDGRLKRTGTIWTASAHIITAVIGSGVLSLAWAIAQLGWIAGPVVMILFSIVTYYTSTLLATCYRSGDQLSGKRNYTYTQAVRSYLGGFSVKFCGWVQYANLFGVAIGYTIAASISMMAIKRSNCYHSSGGKNPCKMNSNWYMISYGVSEIIFSQIPDFHELWWLSIVAAVMSFTYSFIGLGLGIGKVIGNGRIKGSLTGVTIGTVTESQKIWRTFQALGNIAFAYSYSMILIEIQDTIKSPPAESETMSKATLISVLVTTVFYMLCGCFGYASFGDASPGNLLTGFGFYNPFWLIDIANAGIVIHLVGAYQVYCQPLFSFVESNAAERFPNSDFMSREFEVPIPGCKPYKLNLFRLVWRTLFVILSTVIAMLLPFFNDIVGLIGAIGFWPLTVYLPVEMYITQTKIPKWGIKWIGLQMLSVACFVITILAAAGSIAGVIDDLKVYKPFVTSY

SEQ ID NO: 643 - protein, 571 aa, Glycine max
MLEKVEEFNMDKVIQEFELLTRDAERVQRETLKRILEDNASAEYLQSLGLNGRTDPESFKACVPMVTHKELEPYIYRIIDGDASPILTGKPITTMSLSSGTTQGKPKYVPWNDELYETTMQIYQTSFAFRNREFPIKNGKALSFIYGSKQLKTKGGLAARTATSNVFCSAGYKCAMRALQSQCCSPDEVIFGPDFFQSLYCHLLCGLIFREEVEFVSSTFAHSIVHAFRTFEQVWEELCNDIREGVLTRNVTVPSIRMAMSKLLKPNPELANAIHKKCTGLSNWYGLIPELFPNAKYIYGIMTGSMEPYLKKMRHYAGELPLLTADYGSSEGWIAANVNPQLPPEYATYAVLPHIGYFEFIPLLELENTKPLGLTQVKVGQEYEIVMTNPAGLYRYRLGDVVKVMGFHNSTPELKFIRRSSLLLNINIDKNTEKDLQLAVEAAGKLLAEEKLEVVDFSSQVDLSKEPGHYVIFWEISGDASQELLHECCNCLDKSFVDAGYTSSRKVNCIGALELRLVRRGTFQKILDHYLGLGTAVSQYKTPRCVGPTNTRVLQILSENVVNNYLSTAFN

SEQ ID NO: 644 - protein, 298 aa, Glycine max
FGSRAIATETQPQQHKDSSEVSAAAEQRRWTLNDFDIGKPLGRGKFGHVYLAREKTSNHIVALKVLFKSQLQQSQVVHQLRREVEIQSHLRHPHILRLYGYFYDQKRVYLILEYAPKGELYKELQKCKYFSERRAATYVASLARALIYCHGKHVIHRDIKPENLLIGSQGELKIADFGWSVHTFNRRRTMCGTLDYLPPEMVESVEHDASVDIWSLGVLCYEFLYGVPPFEAKEHSDTYRRIIQVDLKFPPKPIVSSAAKDLISQMLVKDSSQRLPLHKLLEHPWIVQNAEPSGVYRS

SEQ ID NO: 645 - protein, 295 aa, Glycine max
MAIATETQPQQHKDSSEVSAAAEQRRWTLNDFDIGKPLGRGKFGHVYLAREKTSNHIVALKVLFKSQLQQSQVVHQLRREVEIQSHLRHPHILRLYGYFYDQKRVYLILEYAPKGELYKELQKCKYFSERRAATYVASLARALIYCHGKHVIHRDIKPENLLIGAQGELKIADFGWSVHTFNRRRTMCGTLDYLPPEMVESVEHDASVDIWSLGVLCYEFLYGVPPFEAKEHSDTYRRIIQVDLKFPPKPIVSSAAKDLISQMLVKDSSQRLPLHKLLEHPWIVQNAEPSGVYRS

SEQ ID NO: 646 - protein, 350 aa, Glycine max
  misc_feature (8)..(9): Xaa can be any naturally occurring amino acid
  misc_feature (190)..(191): Xaa can be any naturally occurring amino acid
  misc_feature (210)..(211): Xaa can be any naturally occurring amino acid
MENAPVVXXKEDDQMDLPPGFRFHPTDEELISHYLYKKVIDTKFCARAIGEVDLNKSEPWDLPWKAKMGEKEWYFFCVRDRKYPTGLRTNRATEAGYWKATGKDKEIFRGKSLVGMKKTLVFYRGRAPKGEKSNWVMHEYRLEGKFSVHNLPKTAKNEWVICRVFQKSSAGKKTHISGIMRLDSFADELXXSSALPPLSDSSPSIGNTKXXLNDTAYVPCFSNPIDVQRNQEGVFDSFTNSIYAVSSNPMGILPSSGSFYSTQGVQAAPNLAFPGSVYTLQDHTILRTLCENNGYKPERDMISVSQETGLTTDINAETSSNFDMGRRPFENHNHASVSVAPLDLDGLWNY

SEQ ID NO: 647 - protein, 366 aa, Glycine max
  misc_feature (209)..(210): Xaa can be any naturally occurring amino acid
  misc_feature (229)..(230): Xaa can be any naturally occurring amino acid
LSSKTYQHNKIEFPIKSFVEMENVPAVCKEDDQMDLPPGFRFHPTDEELISHYLYKKVIDTKFCARAIGEVDLNKSEPWDLPWKAKMGEKEWYFFCVRDRKYPTGLRTNRATEAGYWKATGKDKEIFRGKSLVGMKKTLVFYRGRAPKGEKSNWVMHEYRLEGKFSAHNLPKTAKNEWVICRVFQKSSAGKKTHISGIMRLDSFANELXXSSALPPLSDSSPSIGNTKXXLNDSAYVPCFSNPIDVQRNQEGVFDSFTNSMYGVSSNPMDILPSSGSFYSTQGVQAAPNFAFPGSVYTLQDHTILRALCENNGYKPERDMISVSQETGLTTDINAETSSMGWRPFENHNHASVSVAPLDLDGLWNY

SEQ ID NO: 648 - protein, 167 aa, Glycine max
  misc_feature (1)..(1): Xaa can be any naturally occurring amino acid
  misc_feature (155)..(155): Xaa can be any naturally occurring amino acid
  misc_feature (167)..(167): Xaa can be any naturally occurring amino acid
XAVCKEDDQMDLPPGFRFHPPDEELISHYLYKKVIDTKFCARAIGEVDLNKSEPWDLPWKAKMGEKEWYFFCVRDRKYPTGLRTNRATEAGYWKATGKDKEIFRGKSLVGMKKTLVFYRGRAPKGEKSNWVMHEYRLEGKFSAHNLPKTAEGYYXILFLILLFKLGX

SEQ ID NO: 649 - protein, 584 aa, Glycine max
KKNLTLAIFSYCLKTFQLLWPPPHTIRKETSPKTHTPTSKTMSSSEFQDPAAAASSEAQVSKKAAKKEAAKLEKLRRRQEIATASAATANLSVDEEDPLGGNYGDVPLVELQSKTSADVGEWTRVEALGGALENRSVLIRGRAQAIRPVGKKMAFLVIRENGFTVQCLVQAQADTVSPQMVKFAAALSRESIVDVEGVVSIPSAPIKGATQQVEIQVRKLYCVSRAVPTLPINLEDAARSEVEIETALQAGEQLVRVNQDTRLNFRVLDVRTPANQGIFRIQSQVGNAFRQFLLSEGFCEIHTPKLIAGSSEGGAAVFRLDYKGQPACLAQSPQLHKQMSICGDFGRVFEIGPVFRAEDSYTHRHLCEFTGLDVEMEIKKHYFEVMDIVDRLFVAMFDSLNQNCKKDLEAVGSQYPFEPLKYLRTTLRLTYEEGIQMLKDVGVEIEPYGDLNTEAERKLGQLVSEKYGTEFYILHRYPLAVRPFYTMPCYDNPAYSNSFDVFIRGEEIISGAQRVHVPEFLEQRAAACGIDVKTISTYIDSFRYGAPPHGGFGVGLERVVMLFCGLNNIRKTSLFPRDPLRIAP

SEQ ID NO: 650 - protein, 273 aa, Glycine max
  misc_feature (1)..(1): Xaa can be any naturally occurring amino acid
  misc_feature (14)..(14): Xaa can be any naturally occurring amino acid
XTRPVFRLDYKQQXPPSRSIRPQLHKQMSICGDFGRVFEIGPVFRAEDSYTHRHLCEFTGLDVEMEIKKHYFEVMDLVDRLFVAMFDSLNQNCKKDLEAVGSQYPFEPLKYLRKTLRLTYEEGIQMLKDVGVEIEPYGDLNTEAERKLGQLVSEKYGTEFYILHRYPLAVRPFYTMPCYDNPAYSNSFDVFIRGEEIISGAQRVHVPEFLEQRAAACGIDVKTISTYIDSFRYGAPPHGGFGVGLERVVMLFCGLNNIRKTSLFPRDPLRIAP

SEQ ID NO: 651 - protein, 195 aa, Glycine max
  misc_feature (147)..(148): Xaa can be any naturally occurring amino acid
MHKFLMSLESGPTMFSRRSSGRVASGRVALENGVPLPLLPDPKANLQWDEVKPLSGKPYWHSVLSPTNLQPRYNLMPGMNLRSKLPSNEVPTILIYGGKSWDMVYYGQSKQKAFGAGWKKFVIDNCLRVGDACIFELMESSDKKVIXXEVQILRGDIPSEWLGNEMIIGQGNEMIIGQENEMIIGHSRENPIVLN

SEQ ID NO: 652 - protein, 359 aa, Glycine max
SSEFGSSKHVLRLGSSDLAIPDRKEIRLGLPSKGRMSADTLELLKNCQLSVKQVNPRQYVAEIPQLSNLEVWFQRPKDITRKLLSGDLDLGIVGLDTFSEHGQGSEDLIIVHEALEYGDCRLSLAIPQYGIFENVNSVDELAKMPQWTEEKPLRVATGFTYLGPKFMKENGLKHVTFSTADGALEAAPAMGIADAILDLVSSGTTLRENNLKEIKGGVVLESQAVFIASRKSMIQRKGVLETTHEMLERLEAHLRAIGQFTVTANMRGSSAEEVAERILSQPSLMGLQGPTVSPVFCKHDGKVTADYYAIVICVPQKALYKSIQQLRAIGGSGVLISPLTYIFDEETPRWRQLLSKLGL

SEQ ID NO: 653 - protein, 359 aa, Glycine max
AYVSFFERSQIVFSEASLSQPDRKEIRLGLPSKGRMSADTLQLLKNCQLSVKQVNPRQYVAEIPQLSNLDVWFQRPKDIVRKLLSGDLDLGIVGLDTFSEHGQGNDDLIIVHEALEYGDCRLSLAIPQYGIFENVNSLDELAKMPQWTEEKPLRVATGFTYLGPKFMKENGLKHVTFSTADGALEAAPAMGIADAILDLVSSGTTLRENNLKEIKGGVVLESQAVFITSRKSVIQRKGVLETTHEMLERLEAHLRAIGQFTVTANMRGSSAEEVAERILSQPSLMGLQGPTVSPVFCKRDGKVTADYYAIVICVPQKALYKSIQQLRAIGGSGVLISPLTYIFDEETPRWRQLLSKLGL

SEQ ID NO: 654 - protein, 574 aa, Glycine max
  misc_feature (154)..(154): Xaa can be any naturally occurring amino acid
  misc_feature (161)..(161): Xaa can be any naturally occurring amino acid
  misc_feature (192)..(192): Xaa can be any naturally occurring amino acid
MLEKVEEFNTERMMEEFERVTKDAERIQRETLKRILEDNASAEYLLNLGLNGRTDPESFKAFVPLVTHKDLEPYINRIIDGDFSSVLTGKPITTMSLSSGTTQGKPKYVPWNDELFDTTLQIYHTSFAFRNREFPINNGKALGFIYSSKQFKTXGGVLASXTATTNVFPYPGVPASMQHRQSPRDRSDEVIXSSIRIVGRCGNLLCGLIFREEVQLVSSIFAHSIVYAFRTFEQVWEELCVDIKEGVLNSKVTVPSIREAMSKLLKPDPELANLIHNKCMGLSNWYGLIPELFPNVKYVHGIMTGSMEPYLRKLRHYAGELPLLTSDYGSSEGWIGTNVKPTVPPELATYTVLPQIGYFEFIPLRELEEIKPKPVGLTEVKVGEEYEIVITNPAGLYRYRLGDVVKVMGFHNSAPEIKFVRRSNLLLSINIDKNTEKDLQLAVESASQLLAEEKLEVVDYTSHIDLSKEPGHYVIFWEISGEASEEVLGGCCNCLDKSFVDAGYTSSRKVNCIGALELRVVRRGTFQKILEHSLALGAAVSQFKTSRCVGPTNTKVLQILNENVVKNYLSTAFN

SEQ ID NO: 655 - protein, 224 aa, Glycine max
MAVAGCQKLLELSTKIVAVGRNYAAHAKELGNAVPKEPVLFLKPTSSYLKNGGTIQIPHNEGSLHHEVELAVVIAKKARDVSESSAMDYVAGYALALDMTARDLQAAAKSAGLPWSLAKGQDTFTPISSILPKTAVPNPDDLELWLKVDEEIRQKGSTKDMIFKIPFLISYISSVMTLFEGDVILTGTPPGVGPVKEGQTITAGVTGLVDVQFNVEKRARPVLS

SEQ ID NO: 656 - protein, 633 aa, Glycine max
VACFWIPQTNSTWFWKPLHKPLPVAPSTVTLAVTDTRQNIQSFHMESATQVGAAAQPSSASASVIPSAFDGTLGRHLARRLAETGVRDVFSVPGDFNLTLLDHLIAEPSLNLVGCCNELNAGYAADGYARAKGVGACVVTFTVGGLSVLNAIAGAYSENLPVICIVGGPNSNDYGTNRILHHTIGLPDFTQELRCFQAITCFQAVVNNLDDAHELIDTAISTALKESKPVYISISCNLPGIPHPTFARDPVPFFLAPKVSNQEGLEAAVEATAALLNNAVKPVIVGGPKLRVAKAQKAFLEFAEASGYPIAVMPSGKGLVPEHHPHFIGTYWGAVSSSFCGEIVESADAYVFVGPIFNDYSSVGYSLLIKKEKAIIVQPNRVTIGNGPSLGWVFMADFLTALAKKVKTNTAAVENYRRIYVPPGIPLRREKDEPLRVNVLFKHIQELLSGDTAVIAETGDSWFNCQKLHLPENCGYEFQMQYGSIGWSVGATLGYAQAATDKRVIACIGDGSFQVTAQDISTMIRCGQKTIIFLINNGGYTIEVEIHDGPYNVIKNWDYTRFVDAIHNGQGKCWTAKVRTEDDLTEAIAKATGPQKDSLCFIEVFVHKDDTSKELLEWGSRVAAANSRPPNPQ

SEQ ID NO: 657 - protein, 162 aa, Glycine max
  misc_feature (11)..(11): Xaa can be any naturally occurring amino acid
  misc_feature (15)..(15): Xaa can be any naturally occurring amino acid
  misc_feature (162)..(162): Xaa can be any naturally occurring amino acid
LTLGRTRGFLXNLYXVQMHDSRFKGCDASVLLDSSGTIISEKRSNPNRDSARGFEVIDEIKSALEKECPHTVSCADILALAARDSTVLTGGPSWGVPLGRRDSLGASISGSNNNIPAPNNTFQTILTKFKLKGLDIVDLVALSGRLLVLYLFMVYYLQSSKX

SEQ ID NO: 658 - protein, 339 aa, Glycine max
  misc_feature (332)..(332): Xaa can be any naturally occurring amino acid
MVKSINFLLLLSLLAFAPLCHCKKKIGGYLYPQFYDGSCPRAQEIVQSIVAKAVAKEPRMAASLLRLHFHDCFVKGCDASVLLDSSGTIISEKRSNPNRDSARGFEVIDEIKSALEKECPHTVSCADILALAARDSTVLTGGPSWGVPLGRRDSLGASISGSNNNIPAPNNTFQTILTKFKLKGLDIVDLVALSGSHTIGNSRCTSFRQRLYNQTGNGKADFTLDQVYAAELRTRCPRSGGDQNLFVLDFVTPIKFDNFYYKNLLANKGLLSSDEILLTKNQVSADLVKQYAENNDLFFEQFAKSMVKMGNITPLTGSRGEIRKNCRGINKXCSDIIVM

SEQ ID NO: 659 - protein, 139 aa, Glycine max
LVKSINFLLLLSLLAFAPLCHCKKKIGGYLYPQFYDGSCPRAQEIVQSIVAKAVAKEPRMAASLLRLHFHDCFVKGCDASVLLDSSGTIISEKRSNSNRDSARGFEVIDEIKSALEKECPHTVSCADILALAARDSTVL

SEQ ID NO: 660 - protein, 484 aa, Glycine max
MSTQNRRSSFSSSTTSSLAKRHASASTTSSLAAAPTNMAKKRPPLSNLTNTVAHRNSSSSVPCAAKFAKTKKDVVPACSGNKRPTLANVKPASAVIFPKANSFPVKNEAPPTPPPPVATVTVPAPVVDVSPSKSDTMSVSTDESMSSCDSFKSPDIEYVDNSDVAAVDSIERKTFSHLNISDSTEGNICSREILVELEKGDKFVNVDNNYADPQLCATFACDIYKHLRASEAKKRPSTDFMEKIQKEINSSMRAILIDWLVEVAEEYRLVPDTLYLTVNYIDRYLSGNVMNRQRLQLLGVASMMIASKYEEICAPQVEEFCYITDNTYFKEEVLQMESAVLNFLKFEMTAPTVKCFLRRFVRAAQGVDEVPSLQLECLTNYIAELSLMEYSMLGYAPSLVAASAIFLAKFILFPSKKPWNSTLQHYTLYQPSDLCVCVKDLHRLCCNSPNSNLPAIREKYSQHKYKYVAKKYCPPSIPPEFFQN

SEQ ID NO: 661 - protein, 480 aa, Glycine max
MSTQNRRSSFSSSTTSSLAKRHVSASTTSSSLAAPANMAKKRPPLSNLTNTVAHRNSSSLVPCAAKFAKTKKEVVPACSGNKRPTLANVKPTSAAIFPKANSFPVRDEAPPPVATVTVPAPVVDVSPSKSDAMSVSMDESMSSCDSFKSPDIEYVDNIDVAAVDSIERKTFSNLNISDSTEGNICSRDILVELEKGENFVNVDNNYADPQLCATFACDIYKHLRASEAKKRPSTDFMERIQKEINPSMRAILIDWLVEVAEEYRLVPDTLYLTVNYIDRYLSGNVMNRQRLQLLGVASMMIASKYEEICAPQVEEFCYITDNTYFKEEVLQMESAVLNFLKFEMTAPTVKCFLRRFVRAAQGVDEVPSLQLECLTNYIAELSLMEYSMLGYAPSLIAASAIFLAKFILFPSKKPWTSTLQHYTLYKPSDLCVCVRDLHRLCCNSPNSNLPAIREKYSQHKYKYVAKKYCPPSIPPEFFQN

SEQ ID NO: 662 - protein, 702 aa, Glycine max
  misc_feature (62)..(62): Xaa can be any naturally occurring amino acid
SRTSGRVGGRVGVRVGAKIWICPFCYQRNHFPPHYHAISETNFPGELYPQYTTVEYLLPPPXSLNPSPVFLFLLDTCLIDEEIHFLKSALRRAIGLLPDNPRVRPRARGTQVQVYELGFSDMSKVYVFRGSKEIPAEQILDQLGLSASGRRPHSVAGAGGFPNSGITRFLLPASECEYTLNALLDELQTDQWPVPPGRRPARCTGVALSVAAGLLSACNPGTGARIVALVGGPCTEGPGAIVSKDLSDPVRSHKDLDKDAAPFFKKAVKFYEGLAKQLVGQGHVLDIFASALDQVGVAEMKVAVERTGGLVVLSESFGHSVFKDSFKRVFEDGEQSLGLCFNGTLEINCSKEIKIQGIIGPCTSLEKKGPSVADTVIGEGNTTAWKMCGLDKSTCLTVMFDLSSSGSNTPGAVNPQLYLQFLTSYQDPSGQSVLRVTTVTRRWVDSSVSSEELVQGFDQETAAVVMARFASLKMESEETFDATRWLDRFLIRLCSKFGDYRKDDPSSFTLNPSFSLFPQFMFNLRRSQFVQVFNNSPDETAYFRMLLNRENISNAAVMIQPSLISYSFNALPAPALLDVASIAADKILLLDSYFSVVIFHGMTIAQWRNLGYQNQQEHQAFAQLLRAPHDDAQMIIRERFPVPRLVVCDQHGSQARFLLAKLNPSATYNNAHEMAAGSDVIFTDDVSLQVFFEHLQRLAVQS

SEQ ID NO: 663 - protein, 490 aa, Glycine max
  misc_feature (15)..(15): Xaa can be any naturally occurring amino acid
  misc_feature (23)..(23): Xaa can be any naturally occurring amino acid
  misc_feature (292)..(292): Xaa can be any naturally occurring amino acid
  misc_feature (299)..(299): Xaa can be any naturally occurring amino acid
  misc_feature (308)..(308): Xaa can be any naturally occurring amino acid
  misc_feature (363)..(363): Xaa can be any naturally occurring amino acid
  misc_feature (408)..(409): Xaa can be any naturally occurring amino acid
LERLEVVSMFWDDTXSCILYFLXFVLILQVAIKKMKKKYYSWEECVNLREVKSLRKMNHANIVKLKEVIRECDTLCLVFEYMEYNLYQLMKNREKLFSENEVRNWCFQVFQGLAYMHQRGYFHRDLKPENLLVTKDVIKIADFGLAREISSLPPYTEYVSTRWYRAPEVLLQSHLYSSKVDMWAMGAIMAELFTLRPLFPGSSEADEIYKICSVLGSPTTESWADGLKLARDINYQFPQLAGVHLSTLIPSRSDDAISLVTSLCSWDPCKRPTAAEVLQHPFFPGSFFLPPXSLTPALXNPNSSLHMXASYPPPARGSSTSFLSELLLHPSIPSHQSCNQNSTICWDQGITGSAGPQEILWCXLPNTKITNNFTSPKVQASIASGVQRKLDMANEDGIKSKKSLKTTXXQSKYRLPGKGSPTSINKGRTARGVSETAEKLANMSIGTRRQSLGQTRPPPMKAGVNWISESGNFMLRSGQPERSLTRKVAG

SEQ ID NO: 664 - protein, 478 aa, Glycine max
  misc_feature (393)..(393): Xaa can be any naturally occurring amino acid
  misc_feature (424)..(424): Xaa can be any naturally occurring amino acid
MGGGFRVLHLVRPFLSFLPEVQTADRKVPFREKVIYTVISLFIFLVCSQLPLYGIHSTTGADPFYWMRVILASNRGTVMELGITPIVTSGLVMQLLAGSKIIEVDNNVREDRALLNGAQKLLGILIAVGEAVAYVLSGMYGSVGQLGVGNAILIILQLCFAGIIVICLDELLQKGYGLGSGISLFIATNICENIIWKAFSPTTINSGRGAEFEGAVIALFHLLITRTDKVRALREAFYRQNLPNVTNLLATILIFLIVIYFQGFRVVLPVRSKNARGQQGSYPIKLFYTSNMPIILQSALVSNLYFISQLLHRKYSGNFIVDLLGKWKESEYGGGQSVPVGGIAYYITAPSSLADMAANPFHALFYLVFMLSACALFSKTWIEVSGSSARDVXAKQLKEQQMVMPGHRESNLQKELNRYIPTAXAAFGGICIGALTVLADFMGAIGSGTGILLAVTIIYQYFETFEKERASELGFFGF

SEQ ID NO: 665 - protein, 476 aa, Glycine max
MGGGFRVLHLVRPFLSFLPEVQTADRKVPFREKVIYTVISLFIFLVCSQLPLYGIHSTTGADPFYWMRVILASNRGTVMELGITPIVTSGLVMQLLAGSKIIEVDNNVREDRALLNGAQKLLGILIAVGEAVAYVLSGMYGSVGQLGVGNAILIILQLCFAGIIVICLDELLQKGYGLGSGISLFIATNICENIIWKAFSPTTINSGRGAEFEGAVIALFHLLITRTDKVRALREAFYRQNLPNVTNLLATVLIFLIVIYFQGFRVVLPVRSKNARGQQGSYPIKLFYTSNMPIILQSALVSNLYFISQLLHRKYSGNFFVDLLGKWKESEYGGGQSVPVGGIAYYITAPSSLADMAANPFHALFYLVFMLSACALFSKTWIEVSGSSARDVAKQLKEQQMVMPGHRESNLQKELNRYIPTAAAFGGICIGALTVLADFMGAIGSGTGILLAVTIIYQYFETFEKERASELGFFGF

SEQ ID NO: 666 - protein, 456 aa, Glycine max
  misc_feature (367)..(368): Xaa can be any naturally occurring amino acid
  misc_feature (381)..(382): Xaa can be any naturally occurring amino acid
  misc_feature (421)..(421): Xaa can be any naturally occurring amino acid
MERYKLIKEIGDGTFGTVWRAINKQTGEVVAIKKMKKKYYSWEECVNLREVKSLRKMNHPNIVKLKEVIRESDILYFVFEYMECNLYQLMKDREKLFSEAEVRNWCFQVFQGLAYMHQRGYFHRDLKPENLLVTKDFIKIADFGLAREISSQPPYTEYVSTRWYRAPEVLLQSYMYTSKVDMWAMGAIMAELFSLRPLFPGASEADEIYKICGVIGNPTFESWADGLKLARDINYQFPQLAGVHLSALIPSASDDAISLITSLCSWDPCKRPTASEALQHPFFQSCFYIPPSLRNRAVARTPPPAGTRGALDQQEVKRYSGALPTSKLSNNFSSMKLHPPLASGVQRKLDMVNQDGIKNEKPVRTTXXPKYRQPGKDSSPXXSMSKGRSVRGVSETAEKLRNLSVTNRRQSSIGIGATPVXPPPMKAGGNWISESGNFILGPAQPTGRTFARKVAG

SEQ ID NO: 667 - protein, 476 aa, Glycine max
MGGGFRVLHLVRPFLSFLPEVQTADRKVPFREKVIYTVISLFIFLVCSQLPLYGIHSTTGADPFYWMRVILASNRGTVMELGITPIVTSGLVMQLLAGSKIIEVDNNVREDRALLNGAQKLLGILIAVGEAVAYVLSGMYGSVGQLGVGNAILIIIQLCFAGIIVICLDELLQKGYGLGSGISLFIATNICENIIWKAFSPTTINSGRGAEFEGAVIALFHLLITRTDKVRALREAFYRQNLPNVTNLLATVLIFLIVIYFQGFRVVLPVRSKNARGQQGSYPIKLFYTSNMPIILQSALVSNLYFISQLLHRKYSGNFFVDLLGKWKESEYGGGQSVPVGGIAYYITAPSSLADMAANPFHALFYLVFMLSACALFSKTWIEVSGSSARDVAKQLKEQQMVMPGHRESNLQKELNRYIPTAAAFGGICIGALTVLADFMGAIGSGTGILLAVTIIYQYFETFEKERASELGFFGF

SEQ ID NO: 668 - protein, 478 aa, Glycine max
  misc_feature (182)..(182): Xaa can be any naturally occurring amino acid
  misc_feature (322)..(322): Xaa can be any naturally occurring amino acid
MGGGFRVLHLVRPFLSFLPEVQTADRKVPFREKVIYTVISLFIFLVCSQLPLYGIHSTTGADPFYWMRVILASNRGTVMELGITPIVTSGLVMQLLAGSKIIEVDNNVREDRALLNGAQKLLGILIAVGEAVAYVLSGMYGSVGQLGVGNAILIIIQLCFAGIIVICLDELLQKGYGLGSGXISLFIATNICENIIWKAFSPTTINSGRGAEFEGAVIALFHLLITRTDKVRALREAFYRQNLPNVTNLLATVLIFLIVIYFQGFRVVLPVRSKNARGQQGSYPIKLFYTSNMPIILQSALVSNLYFISQLLHRKYSGNFFXVDLLGKWKESEYGGGQSVPVGGIAYYITAPSSLADMAANPFHALFYLVFMLSACALFSKTWIEVSGSSAKDVAKQLKEQQMVMPGHRESNLQKELNRYIPTAAAFGGICIGALTVLADFMGAIGSGTGILLAVTIIYQYFETFEKERASELGFFGF

SEQ ID NO: 669 - protein, 244 aa, Glycine max
  misc_feature (2)..(2): Xaa can be any naturally occurring amino acid
  misc_feature (219)..(219): Xaa can be any naturally occurring amino acid
  misc_feature (225)..(225): Xaa can be any naturally occurring amino acid
GXKTSFLHKNKEAIIVQPDRVVIANGPAFGCVLMKDFLKALAKRLKHNNTAYEHYHRIFVPEGHPLKATPREPLRVNVLFQHIQKMLSGETAVIADTGDSWFNCQKLKLPKGCGYEFQMQYGSIGWSVGATLGYAQAVPEKRVIACIGDGSFQVTAQDVSTMLRCGQKTIIFLVNNGGITIVVEMYDGPYIVDINGTYTGLIDAIHNGEGKCWTGHLFXDDDLDXSFVPCAGHYNDILCSSDMI

SEQ ID NO: 670 - protein, 626 aa, Glycine max
  misc_feature (11)..(11): Xaa can be any naturally occurring amino acid
  misc_feature (25)..(25): Xaa can be any naturally occurring amino acid
  misc_feature (86)..(86): Xaa can be any naturally occurring amino acid
MPAVYGARLTXTFEDSEKESEYGYXVRKVSGPVVVADGMAGAAMYELVRVGHDNLIGEIIRLEGNSATIQVYEETAGLMVNDPVLXRTHKPLSVELGPGILGNIFDGIQRPLKTIAKRSGDVYIPRGVSVPALDKDTLWEFQPKKIGEGDLLTGGDLYATVFENSLMQHHIALPPDNMGKITYIAPPGQYSIKDTVLELEFQGVKKKFTMLQTWPVRTPRPVASKLAADTPLLTGQRVLDALFPSVLGGTCAIPGAFGCGKTVISQALSKYSNSDAVVYVGCGERGNEMAEVLMDFPQLTMTLPDGREESVMKRTTLVANTSNMPVAAREASIYTGITLAEYFRDMGYNVSMMADSTSRWAEALREISGRLAEMPADSGYPAYLAARLASFYERAGKVKCLGGPERTGSVTIVGAVSPPGGDFSDPVTSATLSIVQVFWGLDKKLAQRKHFPSVNWLISYSKYSTALETFYEQFDPDFINIRTKAREVLQREDDLNEIVQLVGKDALAEGDKITLETAKLLREDYLAQNAFTPYDKFCPFYKSVWMMRNIIHFYNLANQAVERGAGSDGQKISYTLIKHRMGDLFYRLVSQKFEDPAEGEAALVAKFQKLHEDLTNGFRNLEDETR

SEQ ID NO: 671 - protein, 473 aa, Glycine max
MAIIMQALHSPTLRTSPLDPLRGPNNAAAKRRASSAKRVFFVSATVAPKVSAPQRQKDSKKRVVITGMGLASVFGNDVEGYYEKLLAGESGITPIDRFDASKFPTRFGGQIRGFSAEGYIDGKNDRRLDDCLRYCIVAGKKALENADLAPDNHSKIDKERAGVLVGSGMGGLTVFSDGVQALIEKGHRKITPFFIPYAITNMGSALLGIDLGFMGPNYSISTACATSNYCFYAAANHIRRGEADLMIAGGTEAAIIPIGLGGFVACRALSQRNDDPKTASRPWDKDRDGFVMGEGAGVLVMESLEHAMKRGAPIIAEYLGGAVNCDAYHMTDPRSDGLGVSTCIQSSLEDAGVSPEEVNYINAHATSTLAGDLAEINAIKKVFKDTSGIKINATKSMIGHCLGAAGGLEAIATVKAITTGWLHPTINQFNPEPAVDFDTVANVKQQHEINVAISNSFGFGGHNSVVAFSAFRP

SEQ ID NO: 672 - protein, 469 aa, Glycine max
MQALHSPTLRASPLDPLRGPNNAAANRRSSSAKRVFFVSATVAPKVSAPQRQKDPKKRVVITGMGLASVFGNDVEGYYEKLLAGESGITAIDRFDASKFPTRFGGQIRGFSAEGYIDGKNDRRLDDCLRYCIVAGKKALENADLAPDNHSKIDKERAGVLVGSGMGGLTVFSDGVQALIEKGHRKITPFFIPYAITNMGSALLGIDLGFMGPNYSISTACATSNYCFYAAANHIRRGEADLMIAGGTEAAIIPIGLGGFVACRALSQRNDDPKTASRPWDKDRDGFVMGEGAGVLVMESLEHAMKRGAPIIAEYLGGAVNCDAYHMTDPRSDGLGVSTCIQSSLEDAGVSPEEVNYINAHATSTLAGDLAEINAIKKVFKDTSGIKINATKSMIGHCLGAAGGLEAIATVKAITTGWLHPTINQFNPEPAVDFDTVANVKQQHEINVAISNSFGFGGHNSVVAFSAFKP

SEQ ID NO: 673 - protein, 318 aa, Glycine max
MADQSEHSKTASPPEDQDRPVRVYADGIYDLFHFGHARSLEQAKKSFPNTYLLVGCCNDEVTHRYKGKTVMTEAERCESLRHCKWVDGSIPGAPWVINQEFLDKHYIDYVAHDSLPYADASGAANDVYEFVKSVGRFKETKRTEGISTSDVIMRIVKDYNQYVLRNLDRGYSRNELGVSYVKEKRLRVNRRLKTLQEKVKEHQEKVGEKIQIVAKTAGMHRNEWVENADRWVAGFLEMFEEGCHKMGTAIRDRIQERLRGQQSRDGTLRLQNGKDDKDDDDEEYYYDEEDDSDEEYFEEYYDDDELNPQNNGKDEKKE

SEQ ID NO: 674 - protein, 318 aa, Glycine max
MADQSEHSKTALPPEDQDRPVRVYADGIYDLFHFGHARSLEQAKKSFPNTYLLVGCCNDQVTHKYKGKTVMTEAERYESLRHCKWVDEVIPDAPWVINQEFLDKHNIDYVAHDSLPYADASGAANDVYEFVKSVGRFKETKRTEGISTSDVIMRIVKDYNQYVLRNLDRGYSRNELGVSYVKEKRLRVNRRLKTLQEKVKEHQEKVGEKIQIVAKTAGMHRNEWVENADRWVAGFLEMFEEGCHKMGTAIRDRIQERLRGQQSRDGTLRLQNGEDDKDDDDEEYYYDDEEDSDEEYFEEYYDDDELNPQNNGKDEKKE

SEQ ID NO: 675 - protein, 486 aa, Glycine max
MVEKSSRTNLGHHQDFGMEAYSIDGVSSQSESKFYDDDGHVKRTGNVWTTSSHIITAVVGSGVLSLAWAMAQMGWVAGPVVMIFFSAVTLYTTSLLADCYRCGDPVTGKRNYTFMDAVQSILGGYYDTFCGVVQYSNLYGTAVGYTIAASISMMAIKRSNCFHSSGVKNPCHVSSNPYMIGFGIIQILFSQIPDFHKTWWLSIVAAIMSFAYSTIGLALGIAKVAETGTFKGSLTGVRIGTVTEATKVWGVFQGLGDIAFAYSYSQILIEIQDTIKSPPSEAKTMKKSAKISIGVTTTFYMLCGFMGYAAFGDSAPGNLLTGFGFFNPYWLIDIANAAIVIHLVGAYQVYAQPLFAFVEKWASKRWPEVDTEYKVPIPGFSPYNLSPFRLVWRTVFVIITTIVAMLIPFFNDVLGLLGALGFWPLSVFLPVQMSIKQKRTPRWSSRWIGMQILSVVCLIVSVAAAVGSVASIVLDLQKYKPFHVDY

SEQ ID NO: 676 - protein, 487 aa, Glycine max
  misc_feature (249)..(249): Xaa can be any naturally occurring amino acid
  misc_feature (479)..(479): Xaa can be any naturally occurring amino acid
MVEYASRTNLSYCRDYGIEEDSIDDMPLKSDPECYDDDGHLKRTGTIWTTSSHIITAVVGSGVLSLAWAIAQMGWIAGPAVMILFSIVTLYTSSFLADCYRTGDPMFGKRNYTFMDAVSTILGGYSVTFCGIVQYLNLFGSAIGYTIAASLSMMAIQRSHCIIQSSDGENQCNISSIPYTICFGAVQIFFSQIPDFHNMWWLSIVASVMSFTYSIIGLVLGITKIAETGTFKGSLTGISIGTVTEAQKXWGVFQALGNIAFAYSYSFVLLEIQDTIKSPPSEVKTMKKAAKLSIAVTTTFYMLCGCVGYAAFGDSAPGNLLAGFGFHKLYWLVDIANAAIVIHLVGAYQVYAQPLFAFVEKETAKRWPKIDKEFQISIPGLQSYNQNIFSLVCRTVFVIITTVISTLLPFFNDILGVIGALGFWPLTVYFPVEMYILQKRIPKWSMRWISLELMSVVCLLVTIAAGLGSVVGVYLDLQXYNPFSSDH

SEQ ID NO: 677 - protein, 456 aa, Glycine max
  misc_feature (117)..(117): Xaa can be any naturally occurring amino acid
  misc_feature (237)..(237): Xaa can be any naturally occurring amino acid
  misc_feature (247)..(247): Xaa can be any naturally occurring amino acid
  misc_feature (370)..(371): Xaa can be any naturally occurring amino acid
  misc_feature (384)..(384): Xaa can be any naturally occurring amino acid
  misc_feature (456)..(456): Xaa can be any naturally occurring amino acid
MERYKLIKEVGDGTFGSVWRAINKQTGEVVAIKKMKKKYYSWEECVNLREVKSLRKMNHPNIVKLKEVIRESDILYFVFEYMECNLYQLMKDREKLFSEGEVRNWCFQVFQGLAYMXHQRGYFHRDLKPENLLVTKDFIKIADFGLAREISSQPPYTEYVSTRWYRAPEVLLQSYLYTSKVDMWAMGAIMAELFSLRPLFPGASEADEIYKICSVIGSPTTESWADGLKLARDINYXQFPQLAGVQXLSALIPSARDDAISLITSLCSWDPCKRPTASEALQHPFFQSCFYIPPSLRNRAVARTPPPAGTRGALDQQGVKRYSGALPTSKLSNNFSSMKLHPPLASGVQRKLDMVNQDGIKNEKPMRTTXXPKYRQPGKDSPTXSMNKGRSVRGVSETAEKLGNLSVSSRRQSMGQPRPPPPMKAGGNWISESGNFILGPAQQIPTGRTFARKVAX

SEQ ID NO: 678 - protein, 338 aa, Glycine max
  misc_feature (196)..(197): Xaa can be any naturally occurring amino acid
  misc_feature (271)..(271): Xaa can be any naturally occurring amino acid
  misc_feature (282)..(282): Xaa can be any naturally occurring amino acid
MGRSPCCDENGLKKGPWTPEEDQKLVQHIQKHGHGSWRALPKLAGLNRCGKSCRLRWTNYLRPDIKRGKFSQEEEQTILHLHSILGNKWSAIATHLPGRTDNEIKNFWNTHLKKKLIQMGFDPMTHQPRTDLVSTLPYLLALANMTDLMDQDEHAIRLQAEAVHLAKLQYLHYLIRSSNSLSTNKSYDQSATTNMXXPAAFSLLNSISNVKENPVMLQPADDTPAASLSHGIVSSQPLHHPNVLPHHLLEPQVSFSSQSCLNSEIGQGTNXCNHKSRGSHAXDLDSSWIIPSITPPNAIGTSANNPGDASSSTSSYGGGPSSYWSELLFEDPILHELS

SEQ ID NO: 679 - protein, 396 aa, Glycine max
  misc_feature (61)..(62): Xaa can be any naturally occurring amino acid
  misc_feature (74)..(75): Xaa can be any naturally occurring amino acid
  misc_feature (356)..(356): Xaa can be any naturally occurring amino acid
  misc_feature (396)..(396): Xaa can be any naturally occurring amino acid
TRPQKLRMATSPLSQLLLSLILLQNFHHSHSFSLSVENHNEDVIVSSPNATFTAGFYPVGXXNAFCFAIWYTRXXPRTVVWMANRDQPVNGKRSTLSLLGTGNLELTDAGQFIVWSTNTATPSKQNPRLHLYDTGNLVLIANNSEDHVLWQSFDFPTDTLLPNQPLSKSTNLVSSRSGTNYSSAPRPLFFDFENVLRLMYQGPRVSSVYWPSLGFRAIRNGRSTFNDSRVVVLDDFGKLVSSDNFTFTTIDSGMVLRRRLTLDHDGNARVYSIRDGEDNWKVTGIFRPQPCFIHGICGPNSYCSNKPTTGRTCSCLPGYRWVDSQDWSQGCESSFQLWCNNTEKESHFLRLPEFDXYGYDYGYYPNHTYEQCVNLCLELCECKGFHTASQRKVTLX

SEQ ID NO: 680 - protein, 129 aa, Glycine max
  misc_feature (1)..(1): Xaa can be any naturally occurring amino acid
  misc_feature (112)..(112): Xaa can be any naturally occurring amino acid
  misc_feature (129)..(129): Xaa can be any naturally occurring amino acid
XCNRAAAHQALDQIADAIADCSVAIALDGNYAKAISRRATLHEMVRDYEQAACDLKRLIAVLETQSNERAKQSDSPSGSNAVKELRQAHQRLLSVEDQAKKGAPLDVYLILXVLYSIGELDSNHLFGKX

SEQ ID NO: 681 - protein, 316 aa, Glycine max
  misc_feature (1)..(1): Xaa can be any naturally occurring amino acid
  misc_feature (20)..(20): Xaa can be any naturally occurring amino acid
  misc_feature (186)..(186): Xaa can be any naturally occurring amino acid
  misc_feature (232)..(232): Xaa can be any naturally occurring amino acid
  misc_feature (247)..(248): Xaa can be any naturally occurring amino acid
XTDELMCTESEGKGIVQNRXKYREATENYTTALSCNIKYRLFMNWCCCNRAAAHQALGQMADAIADCSVAIALDGNYAKAISRRATLHEMVRDYEQAACDLKRLIAVLETQSNERAKQSDSPSGSNAVKELRQAHQRLLSVEDQAKKGAPLDVYLILGIKSADTATDIKKAYHKAALRHHPDKAGXQLWARSEVGDEGQLWKEISQEVYKDADKLFKMIGEAYAVLSDPALXRSEYDLEEEIREASXXLCNRGGASSRSSNPYGCGRPFGFDSYKSPSDRTSKQTKWTGSLEDPWTFIFSMVRGYSCHGHQDSFAW

SEQ ID NO: 682 - protein, 641 aa, Glycine max
  misc_feature (1)..(1): Xaa can be any naturally occurring amino acid
  misc_feature (343)..(343): Xaa can be any naturally occurring amino acid
XHASAVIITTGKTEIVTATSSKALKDVAYSGSEDEEEERPSTKPDAKKAEPFMSKTTLRSDNHEVSKEELRRQHQAELARQKNEETARRLAGGGSETGDSRSSARTSAELVAYKNINDLPPPREMMIQIDQKNEAVLLPINGSMVPFHVAFIRTVSSQQDTNRNCYVRIIFNVPGTPFSPHDANSMKFPGSIYLKEASFRSKDSRHISEVVQSIKTLRRQVVARESERAERATLVTQEKLQLANNRFKPIRLSDLWIRPAFGGRGRKIPGTLEAHVNGFRYSTTRQDERVDIMFPNIKHAFFQPAENEMITLLHLHLDNHIMVGNKKTKDVQFYVEVMDMVQXNVGGGKRSTYDPDELEEEQRERQRKNKINVEFQTFVNRVNDLWGQPQFNGLDLEFDQPLRELGFPGVPHKSSVFIVPTSACLVELIETPFLVVTLSEIEIVNLERVGLGQKNFDMTVVFKDFKRDVLKIDSIPSTSLDGIKEWLDTTDIKYYESRLNLNWRQILKTITDDPQSFIEGGGWEFLNLEATDSESENSEESDKGYEPSDVEPESDSEDEASDSESLVESEDDDDDEDSEEDSEEEKGKTWEELEREASNADREKGNESDSEEDRKRRKAKSFGKSRGASLSSSMPKRSKLR

SEQ ID NO: 683 - protein, 205 aa, Glycine max
  misc_feature (31)..(31): Xaa can be any naturally occurring amino acid
  misc_feature (51)..(52): Xaa can be any naturally occurring amino acid
  misc_feature (162)..(162): Xaa can be any naturally occurring amino acid
  misc_feature (205)..(205): Xaa can be any naturally occurring amino acid
MSEPEEENNQDYVPSKASRGRWVVAAPPWTXDLDLETSWPLDHMAFGSNPXXSPFLVSTSSDQPYSPLWAFSDGEDPKLPASAFSDCHKIFSCDSNSIAEKPVENDDNKKNLPPLVPMPPVENLDGYCVIKERMTQALRYFKELTELNVLAQVWAPVRNGNXDVLTTLGQPFVLDPHSNGLHQYRTVSLMYMFSVDGGDDGIFGX

SEQ ID NO: 684 - protein, 362 aa, Oryza sativa
MHPRLRPPARAPRDRTRCAAPPVYFPPADCPLEYRKNAALPLRACMRCTDRDSRELTCLQLPARGHAHPLMALHVVWLRCPWSVDAHVVVVVGGGGGLGLGAAASPPPPPPPPPPQRGLSEPLPASSSSWLTPPSPLWLFDERQLLPLDMGAPAAPATAPPAEAAAVVEEVHRTRSGNSDTTSKRVDQINSKWQFHLSIDDNTDSSCLFKERLTQALRYFKESTDQHLLVQVWAPVKSGDRYVLTTSGQPFVLDQQSIGLLQYRAVSMMYMFSVDGENAGELGLPGRVYKQKVPEWTPNVQYYSSTEYPRLNHAISYNVHGTVALPVFDPSVQNCIAVVELIMTSKKINYAGEVDKVCKALE

SEQ ID NO: 685 - protein, 852 aa, Oryza sativa
MDLFVAIALGLERMVRRNSDTTSKRVDQINSKWQFHLSIDDNTDSSCLFKERLTQALRYFKESTDQHLLVQVWAPVKSGDRYVLTTSGQPFVLDQQSIGLLQYRAVSMMYMFSVDGENAGELGLPGRVYKQKVPEWTPNVQYYSSTEYPRLNHAISYNVHGTVALPVFDPSVQNCIAVVELIMTSKKINYAGEVDKVCKALEAVNLKSTEILDHPNVQICNEGRQSALVEILEILTVVCEEHKLPLAQTWVPCKYRSVLAHGGGVKKSCLSFDGSCMGEVCMSTSDVAFHVIDAHMWGFRDACVEHHLQKGQGVSGKAFIYRRPCFSKDISQFCKLEYPLVHYARMFGLAGCFAICLQSMYTGDDDYILEFFLPPNCRNEDDQNALLESILARMKKCLRTLKVVGNGDTNEVCLQISNVLIIETEDLKTNVHFENSEGCFRESPESNGSQRVHEVDNDGNKVSIMSERHLLADDNSQNNGASVGRPNGSGASDSLHKSNKPPERRRGKAEKTISLDVLQQYFSGSLKNAAKSLGVCPTTMKRICRQHGISRWPSRKINKVNRSLSKLKQVIESVQGSDAAFNLTSITGPLPIPVGPSSDSQNLEKASPNKVAELSNLAVEGDRDSSLQKPIENDNLAILMSQQGFIDANNNLQLEADKASHSRSSSGEGSINSRTSEASCHGSPANQTFVCKPIASTFAEPQLIPEAFTKEPFQEPALPLSRMLIEDSGSSKDLKNLFTSAVDQPFLARSSNLALMQNSGTVTIKASFKEDIVRFRFPCSGSVTALKDEVAKRLRMDVGMFDIKYLDDDHEWVKLACNADLEECMEISGSHVIRLLVSDVAAHLGSSCGSSG

SEQ ID NO: 686 - protein, 474 aa, Oryza sativa
  misc_feature (105)..(106): Xaa can be any naturally occurring amino acid
MEFVANGKVILFLLFVSTSVLIVSPASPPRFHYINPHNFTTPASSSSSASASAVHRSRNNNNPSLSLVHRDAISGATYPSRRHQVVGLVARDNARVEHLEKRLVXXSTSPYLPEDLVSEVVPGVDDGSGEYFVRVGVGSPPTDQYLVVDSGSDVIWVQCRPCEQCYAQTDPLFDPAASSSFSGVSCGSAICRTLSGTGCGGGGDAGKCDYSVTYGDGSYTKGELALETLTLGGTAVQGVAIGCGHRNSGLFVGAAGLLGLGWGAMSLVGQLGGAAGGVFSYCLASRGAGGAGSLVLGRTEAVPVGAVWVPLVRNNQASSFYYVGLTGIGVGGERLPLQDSLFQLTEDGAGGVVMDTGTAVTRLPREAYAALRGAFDGAMGALPRSPAVSLLDTCYDLSGYASVRVPTVSFYFDQGAVLTLPARNLLVEVGGAVFCLAFAPSSSGISILGNIQQEGIQITVDSANGYVGFGPNTC

SEQ ID NO: 687 - protein, 342 aa, Oryza sativa
  misc_feature (62)..(62): Xaa can be any naturally occurring amino acid
  misc_feature (65)..(65): Xaa can be any naturally occurring amino acid
  misc_feature (72)..(72): Xaa can be any naturally occurring amino acid
  misc_feature (83)..(83): Xaa can be any naturally occurring amino acid
  misc_feature (96)..(96): Xaa can be any naturally occurring amino acid
  misc_feature (99)..(99): Xaa can be any naturally occurring amino acid
  misc_feature (197)..(197): Xaa can be any naturally occurring amino acid
  misc_feature (342)..(342): Xaa can be any naturally occurring amino acid
ASPAEDRFELLRGIGEECIQEDELMNLLQKKPVPICYDGFEPSGRMHIAQGIVKTINVNKMXSEXGCKVKIXWIASWFAQAKXNKDWGGDIKKNTXLLXGRYMIEIWGAAGMNLDGVEFLWSSEEINKRANEYWPLVMDIARKNNVKRIMRCCQIMGRSDSDELTAAQIFYPCMQCADIFFLKADICQLGMDQRRAXMLAREYCDDIKRRTKPIILSHHMLPGFKEGQEKMSKSDPSSAIFMEDDEAQVNLKIKQAFCPPNIVDGNPCLEYIKYIVFPWFETFEVVRKEENGGNKTFANMNELIADYESGALHPADVKPALAKAINQILQRLTFVERNINWX

SEQ ID NO: 688 - protein, 1411 aa, Oryza sativa
  misc_feature (910)..(910): Xaa can be any naturally occurring amino acid
  misc_feature (1411)..(1411): Xaa can be any naturally occurring amino acid
MLSRQVRRLDAPAPAASSVPAATSDPPASLASPTLELFPPGDSVQDLVEVSTGKVLNADLLNPGSGAAAALALSLQGHGSPKAAASTSLLTSLQPPSSPMKPTSSPAAAVKDFKILKSGRRVELSSQNLSASRQGTGGIQVNSDSWKEVRGKHWWRKSSAFNPPNNKEYLQSRRARFLQHMEAFPPLAPLRFPPRSIPTPSNPLAMDDLTARPLLDSVVMSATGEIERNRERFSARSLVAWQVGANEGKVELNTFADDVRSAFRIRVYLFRPWDESLHGHPNGRTEEAATKIIGRKCSVQYVEEYSRRRNYSCTYDLWIWTDEPRAIPRGGTFAITSADEEGLSTDIPLPDLEPLRNPPPSDTKKGWTYNVLVHVDTLEDLLTRKAHAYKWEYDVQDDGTRYREYPLPCRAEPDPSRGPTDDDDDKDRDKPSRSHHRSRSLWDRLGRRSSSCSREPERDDGRRQGNEDRGRPRNRERSGPRSRSGRSREPKQGTPHTNGVATDVQTQAGLVARQGNRVEEFISALSTPLQQPLLPAPDVNARCPSYAKVTIPAISSAQRHSKRLLRKKRAGAKLETLAQEILSNKFCILDDHASFDDNIKKIYLQRYRKPLSPSSLKTIAELVEKGGCKTIRLKAAKKKVAVAPLSLGQNFVRQCVALPADGTKGGLLLACNENFFSPSDVILGQYSLSATVTMREEGLQWSITVVYGPQLEADKVVFLSEIESLQPSMKSEWLIIGDFNLIYKASDKNNDRLNRRMMQRFRGLLDKIQVKELQLPGRRFTWAGEAIFRIKLRRLARDLKGWSRSQVGDIKLQLAVASEVVFQLDVAQETRTLSDDERLLVSNLKNRILALSVLNKIQIRQRSRQTWIKEGDVNSKFFHIKANSRRRKNFIQSLHTPSGIAISAQDKEEXRPPELLRFFKERIGTRFQRTLAPRLCELVSPNQSAFVRKRAIHDNFVFVKNMVQYLHRTKKTSLFIKIDIAKAFDTVCWPYLLDVLHQFGFGTRWLNWISNLLATSSSQVLLNGSPGQSINHVRGLRQGDPLSPMLFILAMEPFHRILKAAENASLLSPMGGSFDRFRCSLYADDVAVFVKPHASDLSVLMRLLTFFAQTSGLHTNISKTEIYPIRCENINLVSLLANFPGMVKQFPCRYLGLPLHIRKLRKIDFLPLIEKIGLRIPGWKGRFFTSAGRKTLVQSVLSSMPIHHFTALQVPKWVIKRIDRFRRSFLWKGADKTNPGSSLVNWQTVCKPKVLGGLGILDLERFSRAFRLRWLWLGWKDENKPWAGMSVPCDDTDKRLFQAATTIELGNGAKTSFWHDNWLQNSSPKDIAPLCFKLAKRKQKSVHQELHNNNWLISFRQITSVEEIHELVHFGSMLQGVLLTPRLDDISWNWNESKVYTKKKTLIKVKIDSSX

SEQ ID NO: 689 - protein, 1135 aa, Oryza sativa
MERCQRVLFRRLGILHDEEDASVERILSQYMAMFDGPLPPHAIAALTAIFGLDDDDECAMDAALLPLVDEGITDVADKLVCRRWPACRLPSISMEPQLLEHMSMSHSLDFISWNVRVLNSPARCNTVHEMMLDTKCNLACLQETKLQNIDDGLTRFLGGYKLDSFAFKPATGTRGGIIILWNNAALILQDIRIGRFLISAQVMVPLTGATFLMTGVYGPTRHRLKDAFLRHIRRLKPNAGEGWLLFGDFNMIYRARDKNNGNLNLARMRRFRATIDRCELREIPLQNKRFTWSNERQRPTLVKLDHCFCNENWDLAFHHHVLHALPTGPSDHCPLVLSNPAAPCKPRPFRFENFWTRISGFKDMVKASWTQPSPHTEPMRHINHKLQRTASCIKTWAKSLFTEVKIQFHMALDVIQRLDVAQEHRDLSGPELRLRAALKRKTLTLATIERARKRQASRLTHIREGEANTMFFHLRVNARRRKNSIQRLCKENGWVVTHDEKEMTILDHFAHLMGRPGPRPNELNWEALDIQPFDLSTLEESFSEQEIHRAIKEMPVDKAPGPDGYTGIFFKSCWDIVKEDVSLVFNSIFNLRCASLGLLNSANIVLIPKKEGAESVSDYRPISLIHIIAKIFSKLLALRLRPHMRSLVSINQSALIKGRSIHDNFLFVRNMTRRFHRTNRPMLLFKLDITKAFDSIRWDYLMALLQCLGFPVKWRDWLGALLCTSTSQVLLNGIPGQKITHGRGLWQGDPLSPLLFVLAIDPLQHLLTKATDLGSLSKLRGRMPRLRTSMYADDAVIFVNPTRGDVQALTEILQRFGTATGLVTNFQKSQVAVIKCNNIDLDDVLEGVPAVRACFPIKYLGLPLILGRMRKADMQHIFDKITGRITGWRGKNMGLAGRSTLVKSVLMAQPIYLLTALKTSKEALECLDKQRRRFLWAGMGDITGGKCKVNWTKTCLPTRQGGLRILNLEKFMRALRLRWLWHEWKDPNKPWVGLEIPCDEVDKSLFAASTKITIGDENIVRFWDSAWIDGRRPKDLMPLVYAISKKRKKTLRQGKENDAWVGDLALETNPVITVALVEQLVALWTAVRNMQLEEEESDQIAWKFTPHGQYSASSAYKAQCVGAPDTTFDSLIWKV

SEQ ID NO: 690 - protein, 394 aa, Oryza sativa
  misc_feature (129)..(129): Xaa can be any naturally occurring amino acid
  misc_feature (139)..(139): Xaa can be any naturally occurring amino acid
  misc_feature (159)..(159): Xaa can be any naturally occurring amino acid
MLPRLLRRSPRPRPRPPPRRRHISRRGWRWPTEREVAAAAAGSRGHHAYSRKQKSLGLLCTNFVALYDREDVESVGLDDAARRLGVERRRIYDIVNVLESIGMLVRRAKNRYTWIGFGGVPAALAKLKXSRMMRMMTSXMMLRAMRRARSSASASPLTXPSDKPDAPPCKLRSEHRKEKSLGLLTQNFVKLFLTMERNLYLIQIETISLDEAAKRLLGEGHAANNMRTKVRRLYDIANVLSSLNLIEKTQQADSRKPAFRWLGQAKRNEGVTVAFKTLPNKRAFGTDLTNIDNKRGKLDSTMENRGKPTQDGGNLFNNLQRQLGQENRSDFVYGPFHPAVARKQEHDKRRRGRALDWENLASSFRPQYQNPGELHSLYISISPNECCFKNPFCI

SEQ ID NO: 691 - protein, 397 aa, Oryza sativa
  misc_feature (130)..(131): Xaa can be any naturally occurring amino acid
MAAAADAPPPPPEVAPPAPAPAPAPAPYQPPRLAVADGAGGGGGGGGKPCRHHAYSRKQKSLGLLCTNFVALYDREDVESVGLDDAARRLGVERRRIYDIVNVLESIGEMSLRAVSSVASPSLDETSAAXXVSDDEDDDKLDDAEGDAESEKLSLSQSIDNPSDKPDAPPCKPEHRKEKSLGLLTQNFVKLFLTMEIETISLDEAAKRLLGEGQANNMRTKVRRLYDIANVLSSLNLIEKTQQADSRKPAFRWLGQAKRNEGVTVALPPTKTLPNKRAFGTDLTNIDNKRGKLDSTMENRGKPTQDGGNLFNNLQRQLGQENRSDFVYGPFHPAVARKQEHGNRTVQEKERKSIQDWENLASSFRPQYQNPGLNDLFGHYMEAWRSWYSDLRRDRAS

SEQ ID NO: 692 - protein, 317 aa, Oryza sativa
  misc_feature (257)..(257): Xaa can be any naturally occurring amino acid
SVGLDDAARRLGVERRRIYDIVNVLESIGMLVRRAKNRYTWIGFGGVPAALAKLKVRRIRIFYILGFVNYDYKSSDDEDDDKLDDAEGDAESEKLSLSQSIDNPSDKPDAEHRKEKSLGLLTQNFVKLFLTMEVIETISLDEAAKRLLGEGHAANNMRTKVRRLYDIANVLSSLNLIEKTQQADSRKPAFRWLGQAKRNEGVTVALPPTKTLPNKRAFGTDLTNIDNKRGKLDSTMEKEASPRRMVATYSIICRGNXGQENRSDFVYGPFHPAVARKQEHGIQEKERKSIQDWENLASSFRPQYQNPGELQLSLYIY

SEQ ID NO: 693 - protein, 912 aa, Oryza sativa
  misc_feature (266)..(266): Xaa can be any naturally occurring amino acid
  misc_feature (297)..(298): Xaa can be any naturally occurring amino acid
  misc_feature (304)..(304): Xaa can be any naturally occurring amino acid
MDLSIDFLLMFIFFGFLQTRKKNCTWTLAPGNLHLFKADELNGDALTVAFTGCEGVFHTGTSVPEDETNWYSFAKTEAEEIALEYSEKNGLHVITVCPALVFGPLLHTMQLNTSSRVLLYIMKATRLSNCSYLPNFAKTSGHTPPNFNLPKFGITIVLLVDVGNKVELTSEKPTKLGWKPRKLEETLADSVESYKKAGLVDDEPCRLPHVYPFQTDPRMLGFSGSRRRLLLLLSTSAATTAAAMAIGSLIASRLARSTGHALASAXPLSSKPAAADVIGIDLGTTNSCVSVMEGKKXXICLCRXPRVIENAEGARTTPSIVAKNQNGDLLVGITASRQAVTNAQNTVRGSKRLIGRTFDDPQTQKEMKMVPYKIVRGPNGDAWVEMGGQQYSPSQIGAFVLTKMKETAEAFLGKTVSKAVITVPAYFNDAQRQATKDAGRIAGLEVMRIINEPTAAALSYGMNNKEGLIAVFDLGGGTFDVSILEISNGVFEVKATNGDTFLGGEDFDGALLDYLVSEFKKSDNIDLSKDKLALQRLREAAEKAKVELSSTMQTEINLPFITADATGAKHFNITLTRSKFESLVQSLIERTRIPCVNCLKDAGVSAKDIDEVLLVGGMTRVPKVQDIVSQIFNKTPSKGVNPDEAVAMGAAIQGGILRGDVKELLLLDVTPLSLGIETLGGIFTRLINRNTTIPTKKSQVFSTAADNQTQVGIKVLQGEREMATDNKLLGEFQLEGIPPAPRGMPQIEVTFDIDANGIVKVSAKDKSTGKEQEITIKSSGGLSESDIEKMVREAELHSQKDQERKSLIDLKNSADTTIYSIEKSVSEYKDKVPAEVTNEIQSAVSDLRAAMAEDDLEKIKQKLEAANKAVSKIGEHMQQGGGGGSGGGSSSSSGGDQTPEAEYQDAAKEAKM

SEQ ID NO: 694 - protein, 698 aa, Oryza sativa
MAIGSLIASRLARSTGHALASAASQVPPLSALLSFLGEVAPMARHAAASPLLSRLGSVARAFSSKPAAADVIGIDLGTTNSCVSVMEGKTPRVIENAEGARTTPSIVAKNQNGDLLVGITASRQAVTNAQNTVRGSKRLIGRTFDDPQTQKEMKMVPYKIVRGPNGDAWVEMGGQQYSPSQIGAFVLTKMKETAEAFLGKTVSKAVITVPAYFNDAQRQATKDAGRIAGLEVMRIINEPTAAALSYGMNNKEGLIAVFDLGGGTFDVSILEISNGVFEVKATNGDTFLGGEDFDGALLDYLVSEFKKSDNIDLSKDKLALQRLREAAEKAKVELSSTMQTEINLPFITADATGAKHFNITLTRSKFESLVQSLIERTRIPCVNCLKDAGVSAKDIDEVLLVGGMTRVPKVQDIVSQIFNKTPSKGVNPDEAVAMGAAIQGGILRGDVKELLLLDVTPLSLGIETLGGIFTRLINRNTTIPTKKSQVFSTAADNQTQVGIKVLQGEREMATDNKLLGEFQLEGIPPAPRGMPQIEVTFDIDANGIVKVSAKDKSTGKEQEITIKSSGGLSESDIEKMVREAELHSQKDQERKSLIDLKNSADTTIYSIEKSVSEYKDKVPAEVTNEIQSAVSDLRAAMAEDDLEKIKQKLEAANKAVSKIGEHMQQGGGGGSGGGSSSSSGGDQTPEAEYQDAAKEAKM

SEQ ID NO: 695 - protein, 639 aa, Oryza sativa
SYSALPELATRHTSFLAKLRPHRLRTTRQAVALLPEPALAGLVTFATPAHLHELGFSDRSKIYVSRSTNASANEPACAWSARGGAGRPGFPKMPQQPPATAGVTRFLLPVSDCECTLSTLLDELQPDQWPVETGNRAIRCTGVALSVAAGLLGACMPGTGARIIALLGGPCTEGPGMIVSKDLSEPVRSHKDLDKDAAPHFQKAVKFYDGLAKQLVSQGHVLDVFASALDQVGLAEMKVAIERTGGLVVLSESFGHSVFKDSFKRIFEGGEQSLDLSFNGTLEINCSKDIKVQGIIGPCTSLEKKGALCADTVVGQGNTTAWKMCGLDRNTSLTVFWDVSPSGSSQPGHQNPDLYIQFVTSYQHPEGQMRIRVTTICRKWVDGSTNTEELVEGFDQETAAVVLARYISLKMEMEEEFDATRWLDRSLIRLCSRFGDYRKDDPSSFSLHSNFSLFPQFMFNLRRSQFVQVFNNSPDETAYFRMLLNRESITNSVAMIQPSLISFSFDLPPSPVFLDVASIAADRILLLDAYFSVVIFHGMTIAQWRNMGYQNQPEHQQFAQLLQAPHEEAQIIIKGRFPAPRLVVCDQHGSQARFLLAKLNPSATYNSAHDVPPGSDIIFTDDVSFQVFCEHLQRLAVQS

SEQ ID NO: 696 - protein, 1223 aa, Oryza sativa
  misc_feature (682)..(682): Xaa can be any naturally occurring amino acid
  misc_feature (755)..(755): Xaa can be any naturally occurring amino acid
MDCNKDEAVKAKALAEKKMREKDFAGAKRMINKAQNLSKDVDSNISQMLTVCDIHCASATKVNGEIDWYGILQVPVTADDTLIKKQYRKLALLLHPDKNNFAGAEAAFKLVGEANMTLTDRSKRSVYDMKRNASVRIGSARVPYQQSRRTAPVRPTTTPVNLHNVHQSQQHKPSNPSDSQTFWTICPTCGMRYQYYLSILKKALRCQNCLKPFVALDLNEQAVPSGANQRSAGVWKSSGAPQNFPGSQANVGQQAQNSANPVHANFGSHNAHVETKRGADGNEAGGLKNKRKFAKATGNSSKASSVAGSKKRRKAMFESSESSASDTSTDSEEEIIEDGPAASNVGPDQHPRRSSRQKQEVKYNEDSDGDDTDCHGKGDDGFVSSPSLKRLRKGGLFHERGSACAEQIKRETMSGGGNSAEKEKLSHSVSNNGLESNSDDAPNEVICADSEFFDFNQLRHINQFKANQIWACYDSQSCMPRYYARITKVNVPKFMLNFIWLEFDPKNKAEAAWSSGDLPVSCGRFKHGVSDTAKESSMFSHAIFYEKNKTRNSYEIYPRKGEVWALFKGWDIDWSADADKHKNYEYEVVQVLSDLTSSTSIIVMPLVKIKGFVSLFIQSKEASPYVIPQDDTLRFSHCVPRHTMIGTEKEGIPEGAIELDPAALPLNFGVAFASVVPESVLXSVKVQGSGAEHIGSSSGNNCHKGSVDVGESQQHAQIQGSLQGQQRQRSMSTTLDYPESEFFEFPEIRSIHKFXQPGQIWALYSDVDKFPNYYACIKTVDVKNNELQVRWLDACPQSEEERRLVREDLTVACGTFKISSFRIQTYNGTEYLSHPVQAKPGRRNEYEIVPCQGDIWAVFKNWRTGWTAKDYKKCDYELVEIFGHTDSSIQVQLLRKVDGYRAVFMPDRREGAVKTIRKDEYPKFSHQIPCFHLTNERGGKLRGFLELDPLLPIDHHRGNDELDSVQCFCDGNGQTPCCSSPKQAAIRFCLGQDELKAASPMSPLLSDKCRRARAAMSSSPAPVESPWLTMRAMRRVGGADGGGGQRSALMVASYPVLLLLVVLAAFVKYVWIALALYSALLLLFSCASRRLALAERLPSPLGGGGGGGGVAAVTAAEELQGAAARGGVSGETLASIPAFAYDASAHGGGGEAAAQCAVCLEALRGGETARRLPSCAHTFHVACIDMWLGSHATCPVCRRRVERKHKGGVLPPMPPEPETEPPV

SEQ ID NO: 697 - protein, 1113 aa, Oryza sativa
  misc_feature (130)..(131): Xaa can be any naturally occurring amino acid
  misc_feature (305)..(306): Xaa can be any naturally occurring amino acid
  misc_feature (661)..(661): Xaa can be any naturally occurring amino acid
MGRRLKIRTRQHSQPTRRSERIAKQPARPTMERCQRVLFKRLGLNGEEGASIEQVIAEYVAMFDGPLPAHVIAALTTIFGIDDEEQETMDAALISLVGEGARTRPRLFTGRLWPHTLVLGPRVPPPPPRXXTAHASPGPRAHYKTGHAPARGPLHELMLDTKCTLACFQETKLQSIDDGLARFLGGYKLDKFAFKPARGTRGGILLLWSSGDFDVQEFRIGRFSISAQITDIRSGVTFLLTGVYGPTRHHLKDSFLRHIRRLRPSPGEGWLILGDFNMIYCARDKNNSNLNLARMRRFRVVIDRXXPSDHCPLVLSNPQGPHRPRTFKFENFWTRVPGFKDKVKDIWSQPSSHTEPMHRLNQKLQRTAVGLRDWTKGICSEAKLQFHMALNVIQRLDVAQEHRELSPPETRLRAALKRKVLGLASIERARKKQASRVTHIREGDANTKFFHLRVNARRRRNTIQRLKKDSGWAVTHGEKELTIHDHFASFIGRPGPRPKELNWETLDITPIDLATLGEPFTEEEVHRAIKEMPADKAPGPDGFTGAFFKVCWEIIKDDILLVFSSIYNLRCAHLNLLNSANIVLIPKKDGAESVSDYRPISLIHSIAKIFAKMLELRLRPHMHELISVNQSAFIKGRSIHDNYLFSSLMARQGNGSNNPVXMEEDYGKGTPSRRFSSSWRLILYSNDVATSANILHRFGTATGLVTNLQKSQVAAIRCGNIDLEEVMKESLEQLDKQRRRFLWAGTGDITGGKCKITVGDGNTTRFWDSAWINGRRPKDLMPLVYEISKNRKKSLRQGKEDDSWVHDLTLDAGSSITINLLDQLVRLWEAIHEENLAPRCYMGGISAVGTGPMGGSPTQMENKLSTTTEGEELKSAAQVVADVLAENTKKNRFLQNVGFNNAQPRFSEQSTETELEAEKRANAELRAQMLFSDGFLVIRDGYFSSWINRILVVGIGSRCSLPEPARRPPPTPPSHAGEPSHLPRRGGVAELERMLPHNVRRLHIGHGGGVVPGPIDRAASPSVDRGASSRSSWRRRRHHQHHHHPLLPPPRRRMGKARRAAMPCSDAVEIGVGFFVGDGDGFISLDEFAALNATASGDVAAVVTVGADAARIL

SEQ ID NO: 698 - protein, 740 aa, Oryza sativa
  misc_feature (740)..(740): Xaa can be any naturally occurring amino acid
MEVAVGAASWLVGKVVTQLSDSLVEAYVASTELGLNMEQIKSDLMFTQGLLHEAQMRRDVSNPGLPGLLEILSKKADEAEDTLDELQYFIIQDQIHGTHEATPVVDSSIRGQALHGHHVLHRMEVATVERARKKQASRVTHIREGDANTKFFHLKVNARRRRNTIQRLKKDSGWAVTHGEKESTIHDHFASFMGRPGPRPNELNWETLDITPIDLATLGEPFTEEEVHRAIKEMPADKAPGPDGFTGAFFKVCWEIIKDDILLVFSSIYNLRCAHLNLLNSANIVLIPKKDGAESVSDYRPISLIHSIAKIFAKMLALWLRPHMHELISVNQSAFIKGRSIHDNYLFVRNMTRRYHRLRRAMLLFKLDITKAFDSVRWDYLLALLQRKGFSTRWIDWLGALLSSSTSQVLLNGSPGQRIKHGRGLRQGDPLSPLLFILAIDPLQRILSKATELGAISKLRGRTTRLQISMYADDAVIFINPTRNDVATFANILHRFGTATGLVTNLQKSQVAAIRCGNIDLEEVLQGVPAKRANFPLKYLGLPLVLGRLRKTDLQPVFDKISGRVASWRGKNMAVAGRTTLVKSVLSAQPIYLLTALKVTKESLEQLDKQRHRFLWAGTGDITGGKCKVNWAKTCLPTSQGGLGVLSLDKFTRALRLRWLWNEWRDPSKPWVGLETPCDGVDRDLFAASTKITVGDGNTTRFWDSAWINGQRPKDLMPLVYEISKNRKKSLRQGKEDDSX

SEQ ID NO: 699 - protein, 1402 aa, Oryza sativa
  misc_feature (1)..(1): Xaa can be any naturally occurring amino acid
  misc_feature (257)..(257): Xaa can be any naturally occurring amino acid
  misc_feature (417)..(417): Xaa can be any naturally occurring amino acid
  misc_feature (451)..(451): Xaa can be any naturally occurring amino acid
  misc_feature (615)..(615): Xaa can be any naturally occurring amino acid
  misc_feature (774)..(775): Xaa can be any naturally occurring amino acid
  misc_feature (1267)..(1267): Xaa can be any naturally occurring amino acid
  misc_feature (1306)..(1306): Xaa can be any naturally occurring amino acid
XILDIVFGWKARRSMSFAVKLRYVLKLISSSAWVVILPVTYAYTWDSPTGLARIIKSWLGNGQNQPSLYILAVVIYLAPNMLAAMLDGIYVVTVVYMFCQMYLQPRLFVGRGMHEGAFSLFKYTMFWVLLLAMKLTVSFYIEIKPLVQPTKDIMKEPIRDFQWHEFFPRANNNIGVVIALWAPIILVYFMDTQIWYALFSTLIGGIYGAYRRLGEIRTLGMLRSRFESLPEAFNEHLIPSDSHKSKGLRAAFTGNFXTSGDEQEKEKIAARFAQMWNLIITSFREEDLIDNREMDLLLVPYCKDRELNIFQWPPFLLASKIPIALDMAADSGGKDRDLKKRMGSDPYFSYAIRECYGSFKNIINTLVFGQREKIVIQQIFTIVDEHIEGGSLIKDLNMRSLPALSKKFIELLELLVXKFVIMANKEEDLGQVVILFQDMLEVVTRDIMDEXRPARRVRIAWFCHNSIGNRKHEGMTSLDQQDQLFTKAIRFPVEESNAWTEKIKRLHLLLTVKESAMDVPTNLDARRRISFFANSLFMEMPNAPKVRHMLPFSVLTPYYKEDVLFSSHNLEEPNEDGVSILFYLQKIYPGSFLPYAILLMTIIINIVFPNLFEFXKDEWKNFLDRVDRKSEEELREDETLEEELRLWASYRGQTLTRTVRGMMSYRKALELQAFLDMAKDDDLMEGYRATELMSEDSQLMTQCKAIADMKFTYVVSCQQYGIQKRSGEACAHDILRLMTRYPSLRVAYIDEVEAPSQDRNKKTDKVYYSALVKXXSVTKPNEPGQSLDQVIYKIKLPGNAILGEGKPENQNHAIIFTRGECLQTIDMNQEHYMEEALKMRNLLDEFLKKHDGVRYPSILGVREHIFTGSVSSLAWFMSNQETSFVTIGQRVLANPLRVRFHYGHPDIFDRLFHLTRGGVSKASKIINLSEDIFAGFNSTLREGNVTHHEYMQVGKGRDVGLNQIALFEAKIANGNGEQTLSRDIYRLGHRFDFFRMLSCYYTTIGFYFSTMITVWTVYVFLYGRLYLVLSGLDQALATGKKFVHNAPLQVALASESFVQLGFLMALPMMMEIGLERGFRTALSDFVLMQLQLASVFFTFSLGTKTHYYGRTLLHGGAEYRATGRGFVVFHAKFADNYRLYSRSHFVKGIELMILLVVYEIFGQSYRGAITYIFITVSMWFMVGTWLFAPFLFNPSGFEWQKIVDDWTDWNKWISNRGGIGVAPTKSWESWWEKEQEPLRYSGKRGLLLFMGCDFRNFTCHEDCFSRXEEVQCGVPACLPVDQGPYIHNICRHCCDINCHPSHDSSXYLRLHPCFHANWMGLASAIKPAVQAIGLWGSIKALARGYEILMGLLLFTPIAFLAWFPFVSEFQTRMLFNQAFSRGLQISRILGGHKKDRSTRNKE

SEQ ID NO: 700 - protein, 1164 aa, Oryza sativa
  misc_feature (1)..(1): Xaa can be any naturally occurring amino acid
  misc_feature (12)..(12): Xaa can be any naturally occurring amino acid
  misc_feature (420)..(420): Xaa can be any naturally occurring amino acid
  misc_feature (425)..(425): Xaa can be any naturally occurring amino acid
  misc_feature (430)..(431): Xaa can be any naturally occurring amino acid
XGFLRVQMLRSXHFMWWSQIKPLVQPTKDIMKEPIRDFQWHEFFPRANNNIGVVIALWAPIILVYFMDTQIWYALFSTLIGGIYGAYRRLGEIRTLGMLRSRFESLPEAFNEHLIPSDSHKSKGLRAAFTGKPSKTSGDEQEKEKIAARFAQMWNLIITSFREEDLIDNREMDLLLVPYCKDRELNIFQWPPFLLASKIPIALDMAADSGGKDRDLKKRMGSDPYFSYAIRECYGSFKNIINTLVFGQREKIVIQQIFTIVDEHIEGGSLIKDLNMRSLPALSKKFIELLELLQKNKEEDLGQVVILFQDMLEVVTRDIMDEQVGGLLDSVHGGNRKHEGMTSLDQQDQLFTKAIRFPVEESNAWTEKIKRLHLLLTVKESAMDVPTNLDARRRISFFANSLFMEMPNAPKVRHMLPFSXGPQEXEEELXXRGMMSYRKALELQAFLDMAKDDDLMEGYRATELMSEDSQLMTQCKAIADMKFTYVVSCQQYGIQKRSGEACAHDILRLMTVYPSLRVAYIDEVEAPSQDRNKKTDKVYYSALVKASVTKPNEPGQSLDQVIYKIKLPGNAILGEGKPENQNHAIIFTRGECLQTIDMNQEHYMEEALKMRNLLDEFLKKHDGVRYPSILGVREHIFTGRVRFHYGHPDIFDRLFHLTRGGVSKASKIINLSEDIFAGFNSTLREGNVTHHEYMQVGKGRDVGLNQIALFEAKIANGNGEQTLSRDIYRLGHRFDFFRMLSCYYTTIGFYFSTMITVWTVYVFLYGRLYLVLSGLDQALATGKKFVHNAPLQVALASESFVQLGFLMALPMMMEIGLERGFRTALSDFVLMQLQLASVFFTFSLGTKTHYYGRTLLHGGAEYRATGRGFVVFHAKFADNYRLYSRSHFVKGIELMILLVVYEIFGQSYRGAITYIFITVSMWFMVGTWLFAPFLFNPSGFEWQKIVDDWTDWNKWISNRGGIGVAPTKSWESWWEKEQEPLRYSGKRGTILEILLALRFFVYQYGLVYHLNITKHTRSVLTVSVGRRRFSAEFQLVFRLIKGLIFITFVAIVVILIAIPHMTVLDIFVCILAFMPTGWGLLLIAQAIKPAVQAIGLWGSIKALARGYEILMGLLLFTPIAFLAWFPFVSEFQTRMLFNQAFSRGLQISRILGGHKKDRSTRNKE

SEQ ID NO: 701 - protein, 338 aa, Oryza sativa
  misc_feature (39)..(39): Xaa can be any naturally occurring amino acid
  misc_feature (44)..(45): Xaa can be any naturally occurring amino acid
MSFLFKSSNGATTEKNLTLEEQQEKINDLRKELGEHSSXEIQDXXSDASCLRFLRARNWNVQKASKMMKSAVKWRVSYMPQKINWDDVAHEAETGKIYRADYKDKHGRTVLVLRPGLENTTSGKGQIKYLVYCLEKAIMSLTEDQEKMVWLTDFQSWTLGSTPLKVTRETVNVLQDCYPERLGLAILYNPPRIFESFWKIVKPFLDHETYKKVKFVYSSDKESQKIMADVFDLDKLDSAFGGRNPATFEYNSYAERMRADDIKMGSSFKSNGITLPQDHSHVSADKEANGGGSDASSEASFYSGTDSPNHEEGAELNCLLAPVMGWEYRIGQYIQLAN

SEQ ID NO: 702 - protein, 591 aa, Oryza sativa
MLEKKATRSTRVDGVSGEAVIEEFERVTRDAANVQRETLRRILAENGGVEYLRGLGLAGATDPATFRARVPLATHADLEPYIDRIADGDASPVLTAKPATSISLSSGTTQGKRKYLLFNEELVKSTMQIYRISYAFRNREFPVENGKALQFIYSSRETRTKGGLTATTATTNVYRSEEFKATMRDIQSQCCSPDEVIFGPDFAQSLYCHLLAGLLAAGDVQIVSATFAHSVVLAFQTFERAWEDLCADIRRGEVSPSRVTSPAVRRAMAALLAAPNPGLADEVARKCAALSNWYGVIPALWPNARYVYGIMTGSMEHYVKKLRHYAGGLPLVAAEYGASEGWVGANVEPGTPPERATFTVLPDIAYFEFIPLKPVAGDGGYAEAEPVGLTEVAAGELYEVVMTTFAGLYRYRLGDVVKVAGFYNATPKLKFVCRRNLMLSINIDKNSEQDLQLAVDAAARAVLAGEKLEVVDYTSHADVSSDPGHYVVFLELNAADPAAVDGDVMQACCDELDRAFADAGYVGSRKSGAIAPLELRVLQRGTFQKVLRHYLSLGAPVSQFKSPRCVSRSNSGVLQILAGCTVNVFFSSAYD

SEQ ID NO: 703 - protein, 196 aa, Oryza sativa
  misc_feature (1)..(1): Xaa can be any naturally occurring amino acid
  misc_feature (196)..(196): Xaa can be any naturally occurring amino acid
XTRGQAIACFMKYMNTWVTRIYCHKIIRLSGATQDLPRSVVCNVHGVNPKFLEVGKLKLKQLRNGEIAFTKGAYYIGKMVWSKGYRERLDLLSKYQSKLVGLEVDLYGSGEDSDEVRKSAELLSLAVKVHPGRDHADPLFHDYKVFINPSTTDVVCTTTAEALAMGKIVICANHPSNEFFKQFPNCRTYDSGEEFX

SEQ ID NO: 704 - protein, 509 aa, Oryza sativa
  misc_feature (112)..(112): Xaa can be any naturally occurring amino acid
  misc_feature (486)..(486): Xaa can be any naturally occurring amino acid
RSLSPTNTYDFERKVLAPLDRSLSAHQVFVESAEMGENGVDSKLYDDDGRLKRTGTMWTASAHIITAVIGSGVLSLGWAIAQLGWVAGPAVMLLFSFVTYYTSALLADCYRXSGDESTGKRNYTYMDAVNANLSGIKVQVCGFLQYANFVGVAIGYTIAASISMLAIKRANCFHVEGHGDPCNISSTPYMIIFGVAEIFFSQIPDFDQISWLSILAAVMSFTYSTIGLGLGVVQVVANGGVKGSLTGISIGVVTPMDKVWRSLQAFGDIAFAYSYSLILIEIQDTIRAPPPSESRVMRRATVVSVAVTTLFYMLCGCTGYAAFGDAAPGNLLTGFGFYEPFWLLDVANAAIVVHLVGAYQVYCQPLFAFVEKWAQQRWPKSWYITKDIDVPLSLSGGGGGGGRCYKLNLFRLTWRSAFVVATTVVSMLLPFFNDVVGFLGAVGFWPLTVYFPVEMYIVQKRIPRWSTRWVCLQLLSLACLAITVAXSAAGSIAGILSDLKVYKPFATTY

SEQ ID NO: 705 - protein, 258 aa, Oryza sativa
  misc_feature (1)..(1): Xaa can be any naturally occurring amino acid
  misc_feature (206)..(207): Xaa can be any naturally occurring amino acid
XLRNLYLRQVLVQHLTILAPISSPNTDGIDPDSSSNVCIEDCYIRNGDDIVVIKSGWDEYGISFAHPSSNISIRNITGQTSSAGIAFGSEMSGGISDVRAEGLRFINSVHGIRIKTAPGRGGYVKNIYIADVSMDNVSIAIRITGNYGEHPDDNYDKNALPVISNITIKNVVGVNIGTAGMLLGIQGDIFSNICLSNVSLSSKSAXXPWNCSLIEGFSNSVAPEICEQLRPSPGPGQVCYDDAPIINYVLVDFYFWCK

SEQ ID NO: 706 - protein, 418 aa, Oryza sativa
  misc_feature (348)..(349): Xaa can be any naturally occurring amino acid
  misc_feature (386)..(386): Xaa can be any naturally occurring amino acid
  misc_feature (403)..(403): Xaa can be any naturally occurring amino acid
QQACIGHIHSFADKGGAELFVPAGRWLTGSFNLISHLTVSLDADAVIIGSQDSSDWPVIDPLPSYGRGRELPGKRHQSLIFGSNLTDVIITGANGTIDGQGELWWNWFHNHTLNYTRPPLLELMYSDRVVISNLTFMNAPFWNIHPVYCSQVLVQHLTILAPISSPNTDGIDPDSSSNVCIEDCYIRNGDDIVVIKSGWDEYGISFAHPSSNISIRNITGQTRNSAGIAFGSEMSGGISDVRAEGLRFINSVHGIRIKTAPGRGGYVKNIYIADVSMDNVSIAIRITGNYGEHPDDNYDKNALPVISNITIKNVVGVNIGTAGMLLGIQGDIFSNICLSNVSLSSKSXXDPWNCSLIEGFSNSVAPEICEQLRPSPGPGQVCYDGXIATQCQQHSSHISRALXPVTKSFPQVHFSIQL

SEQ ID NO: 707 - protein, 500 aa, Oryza sativa
  misc_feature (134)..(134): Xaa can be any naturally occurring amino acid
  misc_feature (359)..(359): Xaa can be any naturally occurring amino acid
  misc_feature (413)..(414): Xaa can be any naturally occurring amino acid
  misc_feature (451)..(451): Xaa can be any naturally occurring amino acid
  misc_feature (468)..(468): Xaa can be any naturally occurring amino acid
MMSRSASALQVLLVFATVFAATQWATSSAMYCNDLTASVHRPHSVSITEFGAVNDGVTLNTKAFKNAIFYLSSFADKGGGKLFVPAGRWLTGSFNLISHLTVSLDADAVIIGSQDSSDWPVIDPLPSYGRGREXLPGKRHRSLIFGSNLTDVIITGANGTIDGQGELWWNWFHNHTLNYTRPPLLELMYSDRVVISNLTFMNAPFWNIHAVYCSQVLVQHLTILAPISSPNTDGIDPDSSSNVCIEDCYIRNGDDIVVIKSGWDEYGISFAHPSSNISIRNITGQTRNSAGIAFGSEMSGGISDVRAEGLRFINSVHGIRIKTAPGRGGYVKNIYIADVSMDNVSIAIRITGNYGEHPXDDNYDKNALPVISNITIKNVVGVNIGTAGMLLGIQGDIFSNICLSNVSLSSKSXXDPWNCSLIEGFSNSVAPEICEQLRPSPGPGQVCYDGXIATQCQQHSSHISRALXPVTKSFPQVHFSIQLDAPIINYVLVDFYFWCK

SEQ ID NO: 708 - protein, 807 aa, Oryza sativa
MDVVKESWQQEVDATDPYLILHVKLARLCKKLSSWGQKRISKYRLQLQIANEIILRFDVAQESRLLSDDERHLRAACKGRCLALASLERIRLRQRAKIRNLREGDAGTAFFHMKIKSRRRKLLIPRLEHEGRIASTQHDMQNLDREYFESVMSAEDSATRRLLFEQIGLAAADLTELDVPFTEEEIWAAIRCLPNEKSPGPDGYTGLFYQKCWDIIKPELLNALAKFCTGNSQNLEKLNTAIVTLIPKKESPTLLKDYRPISLVHSFSKLAAKIMAQRLATKLDVLIPYSQTASIKGRCIHENFVYVKGLVQQFHRQKKAMVLLKLDISKAFDTVSWGFLLSMMEFRGFGPNWRPWISAIFLTEQTSILINGALTDPIKPARGPRQGESSETSWFAPTAAEASAIKGLLTLFGEATGLKTNFCKSAITPIQCSDQQRAMVESILSCRVEDFPITYLGLPLGTRQPTKAEVQPILDKLAKKVADWKPKMLSIDGRLCLIKSVLMALPVHFMSGQEEVSGGHCLVSWRKVCSPVAKGGLGVKDLNFFGQALRLKWLAKSLEQRERPWTMASFRPGCDVEAIFRSVTEYIIGNGEDTDFWTANWTGKGCFAWRWPILHSYAGRVRLSVAKALTNNRWVRTLQGALSNEAMGEFFQLWDEIHDVLLLPSTDEIRWKLANDGQFSVASAYDMFFMATENCAFGELLWHSRAPSRVRFFMWLALKDRCLRTTSPSETGHMMICAHFVSEMMRTATTCSLRVITRRRCGVLSSDGAMQAFQYRQMGTLPSLIGGWQLDAVFRRATEQILTVLSC

SEQ ID NO: 709 - protein, 344 aa, Oryza sativa
  misc_feature (316)..(316): Xaa can be any naturally occurring amino acid
  misc_feature (329)..(329): Xaa can be any naturally occurring amino acid
MADHAAAEAAPQSSQEEEEDWKEAEGGDGDVEVADRGGGGGAANGGIPEGRPIRVYADGIYDLFHFGHAKSLEQAKRLFPNTYLLVGCCNDELTHKYKGRTVMTEDERYESLRHCKWVDEVIPDAPWVVTEEFLNKHNIDFVAHDSLPYADASGAGNDVYEFVKKLGKFKETQRTDGISTSDIIMRIVKDYNEYVMRNLARGYTRKDLGVSYVKEKRLRVNMGLKNLRDKVKQHQEKVGEKWNTVAKLQEEWVENADRWVAGFLEKFEEGCHSMGTAIKERIQERLKAQSRDFSLLQYDGEDVDEDEDDDEYVREXCHHCEYTSRYFNXLSKIRAEKKKKKKKK

SEQ ID NO: 710 - protein, 149 aa, Oryza sativa
MLRGFPQARRLLRRMGLEKEDAYFWKQMGKGMLCTYALFGAAWLWNETSPLGWWTLKPRPKEEREMAHLYERRMFPYPGDEEAVEEFIKSGGALGTTIGPKGFADSNMDSDNMQKQLQSKKFDQEAQKLWFRMRNEVVQELQEKGFDVE

SEQ ID NO: 711 - protein, 297 aa, Oryza sativa
MPGASWTLTAACHGGTDSANGGQCRVSWTRVCRPRDLGGLGIPDLRVAGFALRVRWLWLQRSGHPYWSDLKASVERSVSDMFAASTFSILGDGQSTLFWTDRWIDGRSIASIAPDLLHVVPPRFRGSRTVAAGLANNSWVGDICGALTVPVISQFLLVWDAVVPTQLSPGVEDHLVWRWTGDQCYSAQSAYQAFFLGQHSFACADLLWHAKGPAKCKFFLWFAFEQRCWTADLLQKRGIDSHSACPFCAQELETANHILIDCVFARQVWLPGSRIGGHPLGYVYLSTFAAASTPWYS

SEQ ID NO: 712 - protein, 488 aa, Oryza sativa
MAGNLLANYVQVNVMLPLDVVTVHNKFEKVDETRAQLKKLTEAGVDGIMVDVWWGLVEGKGPGSYDWEAYKQLFRLVQEAGLKLQAIMSFHQCGGNVGDIVNIPIPQWVRVVGVNDPDIFYTNRGGARNIEYLTLGVDDQPLFHGRTAIQMYVDYMKSFRENMAEFLDAGVIVDIEVGLGPAGEMRYPSYPQSQGWVFPGIGEFICYDKYLEADFKAEAAKAGHPEWELPDDAGEYNDTPEKTRFFTDNGTYVTEKGKFFLTWYSNKLIKHGDKILDEANKVFLGCRVQLAIKISGIHWWYRVPNHAAELTAGYYNLDNRDGYRTIARMLTRHRACVNFTCAEMRDSEQSSEAKSAPEELVQQVLSAGWREGLHVACENALGRYDATAYNTILRNSRPHGINKNGPPEYKLFGFTYLRLSDELLEGQNYSTFKTFVKRMHANLVSATNVDPLEPLQRSMPEMPIGKILQAAHPKLAPFPFDENTDLPV

SEQ ID NO: 713 - protein, 553 aa, Oryza sativa
MALTLRSSTSFLSPLDPSSKREDAPPCCVVPMPAPGSGGRLRLARAAPVEHATMEEMASPEAATLLHHGGGGGQGQRRGKGTAVYVMLPLETVGAGGKVARARALAASLAALRSGGVEGVMVDVWWGVVEREGPRRYDWEGYGELVRMVERAGLRLQMVMSFHQCGGNVGDSCNIPLPGWVLEEMKSNPDIVYTDRSGRRNPEYISLGCDTLPVLKGRTPIQVYSDYMRSFRDTFCGYLGNTIVVEIQVGLGPCGELRYPSYPEANGTWRFPGIGEFQCYDKYMRASLQQAAAAAGHEEWGRGGPHDAGEYKQFPEETGFFRRDGTWCTEYGDFFLGWYSGMLLEHGDRVLAAAEAVFRGTGAALSAKVAGIHWHYRTRSHAAELTAGYYNTRRRDGYAPVAAMLARRGAVLNFTCMEMRDEQQPEHAGCSPEQLVRQVRSAARAARVGLAGENALERYDEAAFAQVVATAASAGLGAFTYLRMNKKLFDGDNWRQFVSFVRAMADGGERAALPSCDTEQSDLYVGFLEKRAAPEAEAAAAAAVVLQSFIVSN

SEQ ID NO: 714 - protein, 335 aa, Oryza sativa
  misc_feature (1)..(1): Xaa can be any naturally occurring amino acid
  misc_feature (320)..(320): Xaa can be any naturally occurring amino acid
  misc_feature (335)..(335): Xaa can be any naturally occurring amino acid
XLIWDGRTNPARASKNRTSVAWETYTLKELLQATGNFSESNKLGEGGFGTVYWGRTSKGVEIAVKRLKAMTAKAEMEFAVEVEILGRVRHRNLLSLRGFYAGGDERLIVYDYMPNHSLLTHLHPHRGTPSSHHHVPLEWPRRVAIAVGAAEGLSYLHHEASPHIIHRDIKASNVLLDAEFVPKVADFGFAKLIPDGVSHLTTRVKGIGYLAPEYAMWGKVSESCDVYSFGVLLLELVSARRPLEKLPGGVKREIVQWAAPLVERRRWERLADPRLAGRFDAAQLRAVVETAMLCTQSSAESRPAMAEVVDMLRFSGGERXAPRRSSPFFMFHNIX

SEQ ID NO: 715 - protein, 613 aa, Oryza sativa
  misc_feature (613)..(613): Xaa can be any naturally occurring amino acid
MLAEVVAATVPFPWHRRQSMKKGKGHHPQQGVAQVDSLIDDHCSGIQPRSKRPSLTTPHREKVTTSIAQGKSREKGTTGASCNCFVLAFSFYKRLMNSETAGRASLLASQQPAASRSAEVPNPSKLQQRWGVWPRLAPTSSTNRGTRCGCASRAQVTAARTHTTRHQRRDASPFPPSSAVCLHPPPTPPSPLSPHCRRRLRRPRAHPETTSLASIERSFSPRALVGTAINPLFRAAYLAKDGDREVTLVIPWLSLRDQELVYPNKIVFGSPLEHEAYVRRWIEERISFRPSFSIKFYPAKFSKELRSILPVGDITECIPDEVADVAVLEEPEHLNWYHHGRKWKNKFRRVIGVVHTNYIAYVKREKNGQAIACFMKYMNTWVTRIYCHKIIRLSGATQDLPRSVVCNVHGVNPKFLEVGKLKLKQLRNGEIAFTKGAYYIGKMVWSKGYRELLDLLSKYQSKLVGLEVDLYGSGEDSDEVRKSAELLSLAVKVHPGRDHADPLFHDYKVFINPSTTDVVCTTTAEALAMGKIVICANHPSNEFFKQFPNCRTYDSGEEFVQLTLDALAEQPAPLTDMQSHDLSWEAATERFMEAAELNLPISAEPRIHQTSKX

SEQ ID NO: 716 - protein, 335 aa, Oryza sativa
MGCLLMLCLVSPLLLATSVHGNPWYGYGYGLFPQFYDHSCPKAKEIVQSIVAQAVARETRMAASLVRLHFHDCFVKGCDASVLLDNSTTIISEKGSNPNMNSLRGFEVVDEIKAALEAACPGTVSCADILALAARDSTVLVGGPYWDVPLGRRDSLGASIQGSNNDIPAPNNTLPTIITKFKRQGLNIVDVVALSGGHTIGMSRCTSFRQRLYNQSGNGMADYTLDVSYAAQLRQGCPRSGGDNNLFPLDFVSPAKFDNFYFKNILSGKGLLSSDQVLLTKSAETAALVKAYADDVNLFFKHFAQSMVNMGNISPLTGSQGEIRKNCRRLNNYYH

SEQ ID NO: 717 - protein, 399 aa, Oryza sativa
  misc_feature (64)..(65): Xaa can be any naturally occurring amino acid
  misc_feature (206)..(206): Xaa can be any naturally occurring amino acid
  misc_feature (208)..(208): Xaa can be any naturally occurring amino acid
  misc_feature (376)..(376): Xaa can be any naturally occurring amino acid
  misc_feature (399)..(399): Xaa can be any naturally occurring amino acid
MNLSFANLPPADAQLFAILQNGGYPFQVAAHAGGPPAAYRGTPGPAVPFFNGHVYPSHMLHPSXXQQGASPQNLQKNPMSNMSASSQKHQPQQSQGLLGYAPNANAAAAASNSQSYSSGNQRPVLLPGLAHRQDSEKTVQDGPSGDDKSSHPQKGGYDHNYAVPVHLPNFALMPPTSAAGGGGQSDKKLSDHHPHQRESRAGCENXSXASSPSFVVPFGSVGAPGSAPGGLDFSSLGPNHQLFQSHQEAGRHGYPQLNFATAQSPVSKSTGGSPPASGSAKGVPPAVQLPSPQQQSAKNPASTSGANKQQSHMMKQQPFPQGGHFFISNAYTPQAPGAAGGVALGLYQKRSADKTQQQQQPHQQSAMSVSERCASXSHMSAAQLTFGAPMSMSVKPSSX

SEQ ID NO: 718 - protein, 458 aa, Oryza sativa
RHEGSRGETKSVAGDSSTHNTVEGERKKSAAAKYPGDSQQHSLSFSRQESKSYVPPFLSGSTNDSSSRTLSLVGSEPSNAFSLGGKSANTSAPAATSAAAPSPSSIPQQQQQQQQHFLQLHKQQQQLIQHHHMNSRPRSAAPSNTGGYSDRLNMPSFQGMMYPSSAAQVGVPSQSPQLKPSSARATGAPAGVASPGASPSNLIVMKSGLHQQQAKAPMQSLSTSNHQPQSSSKMGPVTNMSTGGGDLSRSSNAPVASGSPSNSVSKSTGGSPPASGSAKGVPPAVQLPSPQQQSAKNPASTSGAKSAPTNHYSSMPMPSILGQQPNVPPGSNSGSKQQSHMMKQQPFPQGGHFFISNAYTPQAPGAAGGVALGLYQKRSADKTQQQQQPHQQSAMSAAASNNMKTHHPPAGSFMHLAAASQSPSGVPHSHMSAAQLTFGAPMSMSVKPSSDQKPAAGK

SEQ ID NO: 719 - protein, 363 aa, Oryza sativa
  misc_feature (40)..(40): Xaa can be any naturally occurring amino acid
  misc_feature (51)..(51): Xaa can be any naturally occurring amino acid
  misc_feature (257)..(258): Xaa can be any naturally occurring amino acid
  misc_feature (269)..(269): Xaa can be any naturally occurring amino acid
  misc_feature (363)..(363): Xaa can be any naturally occurring amino acid
DLGIPHIISLYADDVVVFIKPTIEEVKVATEILSIFARIXPCPIASFPCKXLSLPLSIFRLKKEDLQPFIDSIAQRLPAWKSNQMSSIGRVTMVQAVLSAIPIYLLISVDAPKWVIKGIDKIQRGFLWAGKVQANGGCCRIAWSRVCAPKNYGGLGLPNLELMGIALRSRWTWLQRTSLGKPWKGLDIPGSQKEKSFVAASTVCQLGDGQTILFWEDSWLQEGCIRSIAPNIFSPCMRRHRTVAEALTDRRWIKDIXXRGTWDPSHPRXYLKLWSLLHLATCIPTTPDSFSWKWESSGQYISRSSYKALFFGRISFLSTPIWKSLAPPRCRFFLWLPRRKQWWKKPYFGSRQMQGSLPFYLCX

SEQ ID NO: 720 - protein, 230 aa, Oryza sativa
  misc_feature (230)..(230): Xaa can be any naturally occurring amino acid
MAKELVFRLDVAQESRSLSPLETWLWRDLKLKCLGLASLERTIARQRSRLVWLKEGDANTKFFHLHARARRRKNFITRLRDGDQLVVSHDALQELASSHFCAILGTSFERELALDLHSLGLRPAQLEGLDCPFTEDEVWAVIKSLPSDKAPSPDGFTGRFYKSCWPVIKVEILAALNSLFLTNGQGFASLNDALISLLPKKDEAVDVKDFRPISIIHSFGKLFSKILASX

SEQ ID NO: 721 - protein, 967 aa, Oryza sativa
MVSGNLFHCRRNSWPAEEYVGRTALQLLDFDGGSPPEQAWRRRLNSHANLLKEFSVTFMEAMRMMSLGLRLWSYVREEASHGRKAPIDPFTKEKCKPSASQGVPLGGMGSGSISRGFRGEFKNWHIIPGLCETSPIFVSRDGGNKKYSSVLSPGHHEGLKKCNDSGISSWDWNLSGQHSTYHALFPRAWTVYDGEPDPDLKISCRQISPFIPHDYKDSSLPTSVFVYTLVNTGKDRAKVSLLMTWANSIGGFSHHSGGHFNEPFIAEDGVSGVLLHHKTAKDNPPVTFAIAACETQNVNVTVLPVFGLSGEGHDSAKQMWDRMKQNGHFDRENFEAGTSMPSSSGETLCAAVSASTWVEPHGRCTVVFGLAWSSPKIKFQKGCTYNRRYTEFYGTSERSAVNLVHDALTKYRIWEEEIEKWQNPILKNEKLPEWYKFTLFNELYFLVAGGTVWTDGQPPVIDEKPSPGSNQQKSSKRGTRDTKQESVKDNHVKLTAEQVTNGGDLANGEEQSVSKYAAVHGPQMAKATNGLGSQEPIPYLLSKNGPENVGKFLYLEGVEYIMWCTYDVHFYASFALLDLFPKIELSIQRDFANAVLYEDRRRMKFLADGTSGIRKVKGAVPHDLGTHDPWHEMNAYNIHDTSKWKDLNPKFVLQVYRDFAATGDMSFGRDVWPAVCAVMDYMNQFDRDGDGLIENDGFPDQTYDAWTVHGISAYCGGLWLAALQAAATMAHRLGDRPFAEKYKLKFIQAKAVYEAKLWNGSYFNYDSGTSSNSRSIQADQLAGQWYAASSGLPPLFDENKIRSALQKIFEFNVMKVKGGRLGAVNGMTPNGKVDETCMQSREIWTGVTYGVAANMLLHGMEHQGFTTAEGIFIAGWSEEGYGYWFQTPEGWTIDGHYRSLIYMRPLAIWAMQWARSPPKAILDAPKVNLMDRIHLSPQMIRAMNEINVRKIAPDNRCFPSSAFRCEC

SEQ ID NO: 722 - protein, 370 aa, Oryza sativa
  misc_feature (322)..(322): Xaa can be any naturally occurring amino acid
  misc_feature (330)..(330): Xaa can be any naturally occurring amino acid
MINRCFCCVTGGDSDNRTSVDYPWETYTLKELLQATGNFSESNKLGEGGFGTVYWGRTSKGVEIAVKRLKAMTAKAEMEFAVEVEILGRVRHRNLLSLRGFYAGGDERLIVYDYMPNHSLLTHLHPHRGTPSSHHHVPLEWPRRVAIAVGAAEGLSYLHHEASPHIIHRDIKASNVLLDAEFVPKVADFGFAKLIPDGVSHLTTRVKGIGYLAPEYAMWGKVSESCDVYSFGVLLLELVSARRPLEKLPGGVKREIVQWAAPLVERRRWERLADPRLAGRFDAAQLRAVVETAMLCTQSSAESRPAMAEVVDMLRFSGGERXAPRRSSPXGGDGGRQQRRDHDDDRPGRRHRRQQRAAGQEELEIDEVEV

SEQ ID NO: 723 - protein, 530 aa, Oryza sativa
MPRGRSTTTTTSSSASNPFHAFASTLPFLPSPSPSPTSASPSPSPPAPHLAVPLILPITSSSSASAAAASPESNRGARMAAAASGGKAGGGGGLGKGGGPAFVGQVFTMLDPSGNGLMAVTTRFELPQFLASRTPMWFKRILSPLKKSENGPVFRFFMDLNDAVSYVKRLNVPSGMVGACRLDVAYEHFKEKPQMFQFVPSEKQVKAANKLLKSLPQRRRRKKLDGVPVFSAQNLNIAVATNDGIRWYTPYFFDKNLLDNILEASMDQHFHSMVQNRHTRRRRDIVDDSLTSEMMEESADSFLEPPEVQELMNEIGPVGIPLNVVTKAAEIQFLDVVDKMLLGNKWLRKATGIQPQFPYVVDSFEERTAAAIDRAATASSSFTASKDADCFQISKQPETLESDVDNSNRGKHENSNNGQSHFPFSNLLPNIWPGHDRSFKAQGRDRAFRRCDASINNDLQANPLLPKITMVGISMGEGGQMSKANLKKTMEDLTKELEQAGEKTIFSDEKDPLFVANVGDYSRITKISST

SEQ ID NO: 724 - protein, 501 aa, Oryza sativa
VVGYVACAAGLSGACSLLLAATTREGGEVEEGAMGGAEDAPRAAAANGHGNGATVEEKLDELRRLLGKADGDPLRIVGVGAGAWGSVFCALMQDAYGHLRDKVQVRIWRRPGRAVDRATAEHLFEVINAREDVLRRLIRRCAYLKYVEGRLGDRTLYADEILRDGFCLNMIDTPLCPLKVVTNLQEAVWDADIVINGLPSTDTREVFGEIGRYWKERITAPIILSLAKGIEASLDPLPRIITPTQMISNATGVPLENILYLGGPNIASEIYNKEYANARICGADKWRKPLAKFLRQPHFIVWDNSDLITHEVMGGLKNIYAIGAGMVAALTNESATSKSVYFSLCTSEMIYITHLLAEDPEKLAGPLLADTYVTLLKGRNAWYGQKLAKGELTLEMGDSIKGKGTIQGVSAVHAFYELLSQSSLSVTHPEVKKLVAPVELCPILKTLYKILIKRELATDSILQAIRDESMYDPRERIEMSQRQCLYRPSLLGLPKVDITQA

SEQ ID NO: 725 - protein, 144 aa, Oryza sativa
  misc_feature (1)..(1): Xaa can be any naturally occurring amino acid
XDLPLRLRQRFPMCLIFGGDGSYMAPFSLHSDSVLTSLMSQAVPSSIWHRLVAGLNAQLRLVRRGSLRGTFLPVLDWLETHANPSLGVNGVRVDLAWFQATALGYCQLGLVVYAVEEPMSAELDGSPRIKIEQHSLITGGILDS

SEQ ID NO: 726 - protein, 606 aa, Oryza sativa
  misc_feature (393)..(393): Xaa can be any naturally occurring amino acid
  misc_feature (398)..(398): Xaa can be any naturally occurring amino acid
  misc_feature (402)..(402): Xaa can be any naturally occurring amino acid
METHIGSVDGAAAAADNGAVGCPASAVGCPMTSARPGVSARRGVAGTAPGEAAGAGGRQRRVRVPGDFNLTLLDHLIAEPGLLVGCCNELNAGYAADGYARSRGVGACAVTFTVGGLSVLNAIAGAYSENLPVICIAGGPNSNDYGTNRILHHTIGLPDFSQELRCFQTVTCTQAVVTNLEDAHEQIDTAIATALRESKPVYLSISCNLPGLPHPTFSRDPVPFFLAPRLSNKMGLEAAVEATVEFLNKAVKPVLVGGPKLRVAKAGKAFVDLVDASGYPYAVMPSAKGLVPETHPHFIGTYWGAVSTAFCAEIVESADAYLFAGPIFNDYSSVGYSFLLKKDKAIIVQPERVIVGNGPAFGCVMMKEFLSELAKRVNKNTTAYENYKRIFVXLRASXAGEXEPNEPLRVNVLFKHVQKMLNSDSAVIAETGDSWFNCQKLKLPEGCGYEFQMQYGSIGWSVGALLGYAQGAKDKRVIACIGDGSFQVTAQDVSTMIRCAQNSIIFLINNGGYTIEVEIHDGPYNVIKNWNYTGLVDAIHNGEGKCWTSKVKCEEELTEAIGMALGEKKDCLCFIEVIAHKDDTSKELLEWGSRVSAANSRPPNPQ

SEQ ID NO: 727 - protein, 175 aa, Oryza sativa
MELDTDPTKLKAKPIIKPKVEPCDDDDELPPPPPPASGSGEDWEATTPLAAGNPFFTALIAKSHLHPKFQMWIPPRFQHRLAEPEARTAAVLHSGGKSWATSYCGHLKMKKLDAGWSEFAVDNRLLVGDACVFELVAMGAAGGLEFQVQILRGGLPAEVVTSKGLTSDQPILIVD

SEQ ID NO: 728 - protein, 458 aa, Oryza sativa
  misc_feature (247)..(247): Xaa can be any naturally occurring amino acid
  misc_feature (257)..(257): Xaa can be any naturally occurring amino acid
  misc_feature (458)..(458): Xaa can be any naturally occurring amino acid
MPDSDVSENRFRPQCWPQLSAATQSLSDQSGPSTMRWSAQIHHLAAWDPFFENCIRTASIFYSPRMRVGQRVATSICYLIMKMGGGDELQRNMSFSANCYLLYALKLNLSLKRIYSSLSSQKFDMFSTHEHEALQKREPIKAHLLSQPTRYVILVAHAMSAISRPSIILGAHTVTTNGSSARTHEAERNSTVERSTHVLKAASSPKSPKSPIRISPPRRRCGRSSPPLSLLFPHGDRHRVALRGGEXASPHSQEVKXSNHIVALKVLFKSQLKQSQVEHQLRREVEIQSHLRHPNILRLYGFIIISSATWILQTRVYLILEYALKGELYKELQRCKHFSERRSATYIASLAHALIYLHGKHVIHRDIKPENLLIGSQGELKIADFGWSVHTFNRRRTMCGTLDYLPPEMVEKTEHDYHVDIWSLGILCYEFLYGVPPFEAKEHSETYRRGCILHYRFX

SEQ ID NO: 729 - protein, 375 aa, Oryza sativa
  misc_feature (341)..(341): Xaa can be any naturally occurring amino acid
  misc_feature (370)..(370): Xaa can be any naturally occurring amino acid
SLPGAGEGGGGGIGGGGGDLWPFDSLTTSLLFSSVSASPQPLPASSSSWLTPPSPLFHLSIDDNTDSSCLFKERLTQALRYFKESTDQHLLVQVWAPVKSGDRYVLTTSGQPFVLDQQSIGLLQYRAVSMMYMFSVDGENAGELGLPGRVYKQKVPEWTPNVQYYSSTEYPRLNHAISYNVHGTVALPVFDPSVQNCIAVVELIMTSKKINYAGEVDKVCKALEAVNLKSTEILDHPNVQICNEGRQSALVEILEILTVVCEEHKLPLAQTWVPCKYRSVLAHGGGVKKSCLSFDGSCMGEVCMSTSDVAFHVIDAHMWGFRDACVEHHLQKGQGVSGKAXIYRRPCFSKDISQFCKLEYPLVHYARMFXGLAGC

SEQ ID NO: 730 - protein, 1431 aa, Oryza sativa
  misc_feature (193)..(193): Xaa can be any naturally occurring amino acid
  misc_feature (199)..(199): Xaa can be any naturally occurring amino acid
  misc_feature (276)..(276): Xaa can be any naturally occurring amino acid
  misc_feature (298)..(299): Xaa can be any naturally occurring amino acid
MTAAVSLPSPRVSGRAPTALTHTGPRVSAHTHPILGHAKRAQLRVGLPKGRRFPSRRPPFVGPPSLIGLSSQAGQSRPFVGPPFHLGPPNHFVPAPSLPNRMKMTAAAGGYKLDKFAFKPARGTRGGILLLWNSGVLDVQEVRIGRFSVSAQVTPIVTGTTFLLTAVYGPTRHHLKDAFLRHIRRLRPSSGEXNRKFTXSNERRRATLVKLDRCFCNEEWDLAFPHHVLHALPTGPSDHCPLVLSNPHCPRSPRRFKFENFWTRIPGFKDKVKALXSQSSSHTEPMHRLNQKLQRTAXXWAKGICTEAKLQFHMALDVIQRLDVAQEHRDLSPQEMWLRAALKRKILGLASIERARKKQASRVTHIREGDANTKFFHLKINVRKRKNTIQRLRKDNGWAVTHGEKESTIHDHFASFMGRSGPRPNELNWEALDIMPVDLATLGKPFSEEEVHRAIKEMPADKAPGPDGFTGAFFKACWEIIKEDILLVFNSIFNLRCAHLNLINSANIVLIPKKDGAESVSDYRPISLIHSIAKIFSKLLALRLRPHMHALISVNQSAFIKGRSIHDNFLFVWNMARSYHRLRRAKLLFKLDITKAFDSVRWDYLLALLQQRGFPTRWVDWLGALLSTSTSQVLLNGSPGQRIKHGRGLRQGDPLSPLLFILAIDPLQRILSKATELGVISKLRGRTTRLRISMYADDAVIFINPTRGDVTAFADILHRFGTATGLVTNLQKSQVAAIRCDNIDLTEVLQGIPAMRANFPLKYLGLPLVLGRMRKTDLQPVFDKISGRVASWRGKNMEAAGRTTLVKSVLSAQPIYLLTALKVTKESLEQLDKQRRRFLWAGTSDITGGKCKVNWTKTCLPTSQGGLGVLNLDKFTRALRLRWLWHEWKDPTKPWAGLETPCDGLNKDLFAAATKVAVGDGNTARFWDAAWIDGQRPKDLMPLVYAISKNRGKSLRQGKEGDAWVNDLTFDAATPITISLVEQLVCLWETVRNVHLNSEEPNQIAWKFTANGHYTASSAYHAQCLGAPNSNLNSLIWKVWAPGKCKFHAWLIIQNRVWTSDRLATRGWQNNGHCPLCRSEPETGIHLVGKCRYTKRIWSLVASWTGYQQLEPNEWEEARYFRSFQAHPSKKRSVMGYKCSSCLQAVVLWQLLLPWTHIAVAAGAKSSSPAGKPKAAAPPVVAGPVSKVEDATRFQIYYGQSFKVVKNNWNGKSYLLMQLLGVLQNLKGITSDQIASQCVLQSYASGNVQLFNKTDAQMLTQFSAHFLSTTDEGCNFAAYVPSEEGTPLQIKANYLCLSKAAANLSTRFKPIVAWIEFTQGMWTFVSDGWIVQYVTDAGAEVVDATITNKRFNNSDPEDMDNFHAILCTVDVVIDQTYASDPAEYKLSTFLESINVDRDSCFSFVANRSIWRFDKRIGYSKKLGNSFLYALH

SEQ ID NO: 731 - protein, 488 aa, Oryza sativa
MAGNLLANYVQVNVMLPLDVVTVDNKFEKVDETRAQLKKLTEAGVDGVMVDVWWGLVEGKGPGSYDWEAYKQLFRLVQEAGLKLQAIMSFHQCGGNVGDIVNIPIPQWVRIVGSDDPDIFYTNRGGARNIEYLTLGVDDQPLFHGRTAIQMYADYMKSFRENMAEFLDTGVIVDIEVGLGPAGEMRYPSYPESQGWVFPGIGEFICYDKYLEADFKAEAAKAGHPEWELPDDAGEYNDTPEKTRFFADNGTYVTEKGKFFLTWYSNKLIKHGDKILDEANKVFLGCRVQLAIKISGIHWWYRVPNHAAELTAGYYNLDNRDGYRTIARMLTRHRACVNFTCAEMRDSEQSSEAKSAPEELVQQVLSAGWREGLHVACENALGRYDATAYNTILRNSRPHGINKNGPPEHKLFGFTYLRLSDELLEGQNYSTFKTFVKRMHANLVSATNVDPLEPLQRSMPEMPIGKILQAAHPKLAPFPFDENTDMPV

SEQ ID NO: 732 - protein, 318 aa, Oryza sativa
MSFLFKSSNGATTEKNLTLEEQQEKINDLRKELGEHSSEEIQDFLSDASCLRFLRARNWNVQKASKMMKSAVKWRVSYMPQKINWDDVAHEAETGKIYRADYKDKHGRTVLVLRPGLENTTSGKGQIKYLVYCLEKAIMSLTEDQEKMVWLTDFQSWTLGSTPLKVTRETVNVLQDCYPERLGLAILYNPPRIFESFWKIVKPFLDHETYKKVKFVYSSDKESQKIMADVFDLDKLDSAFGGRNPATFEYNSYAERMRADDIKMGSSFKSNGITLPQDHSHVSADKEANGGGSDASSEASFYSGTDSPNHEEGGSILA

SEQ ID NO: 733 - protein, 186 aa, Oryza sativa
ARGHVTETEQISEMMRPPAARGERKRKVMASVDTHDHGNTELPDSNENADESLRSPENGERLASGSGCVDSNGDVEKKKMPLASCSSGSKKQKRRVEATSPAEHGEDAPSAPKLVENSSSSKKKGKKKPAAPEAVTDAVVVDEPAPVLPEVNVVVVEPEKPKKKYVPITPTIHTGFSFSIVHLLTA

SEQ ID NO: 734 - protein, 506 aa, Oryza sativa
  misc_feature (23)..(23): Xaa can be any naturally occurring amino acid
  misc_feature (75)..(75): Xaa can be any naturally occurring amino acid
  misc_feature (92)..(92): Xaa can be any naturally occurring amino acid
RHEGRPRVGKSTQTLASALANPXAPGRGGGGLQGRIEASGEAARGRRGGGEGGRGGGGGQAPGKAGNAKLNLAAXAAPVKKGSLASGRSVGXTNRASAVKSASTKPAPAISRHESAAQKESVLPPKVPSIVPTAALAPVTVPCSSFVSPMHSGDSVSVDETMSTCDSMKSPEFEYIDNGDSSSVLGSLQRRANENLRISEDRDVEETKWKKDAPSPMEIDQICDVDNNYEDPQLCATLASDIYMHLREAETRKRPSTDFMETIQKDVNPSMRAILIDWLVEVAEEYRLVPDTLYLTVNYIDRYLSGNEINRQRLQLLGVACMLIAAKYEEICAPQVEEFCYITDNTYFRDEVLEMEASVLNYLKFEMTAPTAKCFLRRFVRVAQVSDEDPALHLEFLANYVAELSLLEYNLLSYPPSLVAASAIFLAKFILQPTKHPWNSTLAHYTQYKSSELSDCVKALHRLFSVGPGSNLPAIREKYTQHKYKFVAKKPCPPSIPTEFFRDATC

SEQ ID NO: 735 - protein, 312 aa, Oryza sativa
  misc_feature (1)..(1): Xaa can be any naturally occurring amino acid
  misc_feature (26)..(26): Xaa can be any naturally occurring amino acid
  misc_feature (28)..(28): Xaa can be any naturally occurring amino acid
  misc_feature (57)..(58): Xaa can be any naturally occurring amino acid
  misc_feature (204)..(205): Xaa can be any naturally occurring amino acid
  misc_feature (214)..(214): Xaa can be any naturally occurring amino acid
XHEGHNSASLWDNAKNDCLQDVQSEXYXNKNSCLSSSNTSIMESQDAVDVSSTLSNXXEDDRATHGTASIECNGDGDETDSKRRKLDALTAATAAASRGVREPRVVVQTTSEVDILDDGYRWRKYGQKVVKGNPNPRSYYKCTHQGCSVRKHVERASHDLKSVITTYEGKHNHEVPAARNSGHGSSGSGNAPSAPQSNGSQRRXXRTRASQLQXSLVARLPSAPSLNQFGPSGNFPFGMVPPGMAIPMPSLGSLAPAKMAGHPSTMQGYQGLMIPEGEMKTEPMSQLGFPAVNQSSSSFQQMMNSPSFGPQM

SEQ ID NO: 736 - protein, 531 aa, Oryza sativa
  misc_feature (13)..(13): Xaa can be any naturally occurring amino acid
MPRGRSTTTTTCXSSASNPFHAFASTLPFLPSPSPSPTSASPSPSPPAPHLAVPLILPITSSSSASAAAASPESNRGARMAAAASGGKAGGGGGLGKGGGPAFVGQVFTMLDPSGNGLMAVTTRFELPQFLASRTPMWFKRILSPLKKSENGPVFRFFMDLNDAVSYVKRLNVPSGMVGACRLDVAYEHFKEKPQMFQFVPSEKQVKAANKLLKSLPQRRRRKKLDGVPVFSAQNLNIAVATNDGIRWYTPYFFDKNLLDNILEASMDQHFHSMVQNRHTRRRRDIVDDSLTSEMMEESADSFLEPPEVQELMNEIGPVGIPLNVVTKAAEIQFLDVVDKMLLGNKWLRKATGIQPQFPYVVDSFEERTAAAIDRAATASSSFTASKDADCFQISKQPETLESDVDNSNRGKHENSNNGQSHFPFSNLLPNIWPGHDRSFKAQGRDRAFRRCDASINNDLQANPLLPKITMVGISMGEGGQMSKANLKKTMEDLTKELEQAGEKTIFSDEKDPLFVANVGDYSRITKISST

SEQ ID NO: 737 - protein, 416 aa, Oryza sativa
  misc_feature (1)..(1): Xaa can be any naturally occurring amino acid
XMLDPSGNGLMAVTTRFELPQFLASRTPMWFKRILSPLKKSENGPVFRFFMDLNDAVSYVKRLNVPSGMVGACRLDVAYEHFKEKPQMFQFVPSEKQVKAANKLLKSLPQRRRRKKLDGVPVFSAQNLNIAVATNDGIRWYTPYFFDKNLLDNILEASMDQHFHSMVQNRHTRRRRDIVDDSLTSEMMEESADSFLEPPEVQELMNEIGPVGIPLNVVTKAAEIQFLDVVDKMLLGNKWLRKATGIQPQFPYVVDSFEERAATASSSFTASKDADCFQISKQPETLESDVDNSNRGKHENSNNGQSHFPFSNLLPNIWPGHDRSFKAQGRDRAFRRCDASINNDLQANPLLPKITMVGISMGEGGQMSKANLKKTMEDLTKELEQAGEKTIFSDEKDPLFVANVGDYSRITKISST

SEQ ID NO: 738 - protein, 602 aa, Oryza sativa
  misc_feature (131)..(132): Xaa can be any naturally occurring amino acid
FGTRPPPPPPPPHLAPSPSPRAGEFRFRLCLVQVQANYLNLNPILLLSPPPRCRRSLHPMPPPPPPPPRGISRADLSSATISKKQLKKDARKAEKAEKASQRQQQQQPQADADDPFAANYGDVPVEEIQSXXTISGRVWTEIGGLDEAAAGRSVLIRGAAQAIRPVSKKMAFVVLRESMSTVQCVLVASADAGVSTQMVRFATSLSKESIVDVEGVVSLPKEPLKATTQQVEIQVRKIYCINRAIPTLPINLEDASRSEAEIEKAEQAGEKLVRVGQDTRLNYRAIDLRTPANQAIFRIQCQVENKFREYFLSKNFVGIHSPKLIAGSSEGGAAVFKLQYNGQPACLAQSPQLYKQMAICGGFERVFEVGPVFRAENSNTHRHLCEFVGLDAEMEIKEHYFEVCDIIDGLFVAIFKHLNENCKKELETINRQYPFEPLKYLEKTLKLTYEEGIQMLKEAGTEIEPMGDLNTEAEKKLGRLVKEKYGTEFFILYRYPLAVRPFYTMPCYDNPAYSNSFDVFIRGEEIISGAQRIHLPELLTKRATECGIDASTISSYIESFSYGAPPHGGFGVGLERVVMLFCALNNIRKTSLFPRDPQRLVP

SEQ ID NO: 739 - protein, 403 aa, Oryza sativa
  misc_feature (23)..(24): Xaa can be any naturally occurring amino acid
  misc_feature (123)..(124): Xaa can be any naturally occurring amino acid
  misc_feature (131)..(131): Xaa can be any naturally occurring amino acid
  misc_feature (135)..(136): Xaa can be any naturally occurring amino acid
MMNVPSAAAASSCDDFGYNATPXXPPPSLLPIMDQDGGGGSIQRDHHHHHNHQQLGYNLEPSSLALLPPSNAAAAAAHHATIAHASPHDLLQFYPTSHYLAAAGGAGGGGNPYSHFTAAAAAXXSTFQSYXPAAXXQAAPEYYFPTLVSSAEENMASFAATQLGLNLGYRTYFPPRGGYTYGHHPPRCQAEGCKADLSSAKRYHRRHKVCEHHSKAPVVVTAGGLHQRFCQQCSRFHLLDEFDDAKKSCRKRLADHNRRRRKSKPSDGDSGEKRRAQANKSAATKDKAGSSSKNAGIGDGFETQLLGGAHMSKDQDQAMDLGEVVKEAVDPKGKASMQQQHGFPFPSSSGSCLFPQSQGAVSSTDTSNIAQVQEPSLAFHQQHHQHSNILQLGQAMFDLDFDH

SEQ ID NO: 740 - protein, 403 aa, Oryza sativa
  misc_feature (23)..(24): Xaa can be any naturally occurring amino acid
  misc_feature (123)..(124): Xaa can be any naturally occurring amino acid
  misc_feature (131)..(131): Xaa can be any naturally occurring amino acid
  misc_feature (135)..(136): Xaa can be any naturally occurring amino acid
  misc_feature (356)..(356): Xaa can be any naturally occurring amino acid
MMNVPSAAAASSCDDFGYNATPXXPPPSLLPIMDQDGGGGSIQRDHHHHHNHQQLGYNLEPSSLALLPPSNAAAAAAHHATIAHASPHDLLQFYPTSHYLAAAGGAGGGGNPYSHFTAAAAAXXSTFQSYXPAAXXQAAPEYYFPTLVSSAEENMASFAATQLGLNLGYRTYFPPRGGYTYGHHPPRCQAEGCKADLSSAKRYHRRHKVCEHHSKAPVVVTAGGLHQRFCQQCSRFHLLDEFDDAKKSCRKRLADHNRRRRKSKPSDGDSGEKRRAQANKSAATKDKAGSSSKNAGIGDGFETQLLGGAHMSKDQDQAMDLGEVVKEAVDPKGKASMQQQHGFPFPSSSGSCLFPXSQGAVSSTDTSNIGQVPEPSLAFHQEHHQHSNILQLGQAMFDLDFDH

SEQ ID NO: 741 - protein, 282 aa, Oryza sativa
  misc_feature (1)..(1): Xaa can be any naturally occurring amino acid
  misc_feature (282)..(282): Xaa can be any naturally occurring amino acid
XGLKLSQWGQKKISYFRLQIQIANEDILRLDVAQESRLLTDLERRLRAALKGKCLALASLERIRVRQRARIRNLKEGDAGTAYFYMKLRARRRKALIPRLEHNGKVATTQIDMQQLACEYFETIMGQAEGDSKQFNLQSIQMAKGNLASFDENFTEEEVWAAIKNLPTEKSPGPDGYTSLFYQKCWAVIKDDLLAAMGKFCTGNSQNLELLNSAQITLIPKKEAPTMLKDYGPISLIHSFSKLATKVMARRLATRLDDLVPHTQTAFIKGRSIHENFIFVKX

SEQ ID NO: 742 - protein, 1174 aa, Oryza sativa
MAKGSLEMEVEEPCLLSGGREGGFANCNFAMLLACDCDDDAQTAENGNAPMLSNYRAQPAPPLAEPLLLDKPQRAHWLRQLKPWRRNAADDHLSAGIAINWSSVRSATKDWITNPMNIAMLLWLLCVAVSGAMLVLLLLGLLDGAFPTPAARNHWIEINNQVLNALFTLMSLYQHPVLCHHLFLLCRWRPADAADLRAAYFKDGAGPRHGERAHMAVVVALLHLTVACQYVLCGLYWGYTKKTRPELVENGFFVLGVVAPVVAVVYTVCSPLGKDNYGELACPNAFDSVSQHKCTGHAVVEPEWAGGMFDCGGDATAWWLSLSCTFCAFGWNMERLGFGSMFVHTATFVLLCFAPLWVMGVSALHIHDVVIGDMVGGAGALLCVCGLLYGGYWRIQMRERFGLPASTACCGSPSVTDYARWLFCWPCALAQEVRTESLYHIDCETFYKKLPVVDDVEDEKRLPLLASHHVQFHEPPDTMIMAASEGSNDHVVIVHEEMVPPAVQVVVEQVVVEGDKSEEECSAVHDEKIMGSPLPESVVIVDDDEIPASLSDGSWTVEKKQEQHKKHKEKKKERLLDFLRAAPSKAPWFSFSGAAFLTRLASLRTTNNPAASRRLPAFVRSVDWRALRAKCLAWAKHPMNAALLIWLAFVAGGVAFVFLLMTGALNSAVPAASRRAGEQLHARSLKLPSHTNPHVLTSLLSLYAKCGLLHRAQRVFDEMPHPSTVPWTALITAYMDAGDLREAVHVARNAFANGMRPDSFTAVRVLTACARIADLATGETVWRAAEQEGVAQSVFVATAAVDLYVKCGEMAKAREVFDKMRHKDAVAWGAMVGGYASNGHPREALDLFLAMQAEGMKPDCYAVAGALSACTRLGALDLGRQAIRMVDWDEFLDNPVLGTALIDMYAKCGSTVEAWVVFQQMRKKDIIVWNAMILGLGMTGHEKIAFALVGQMEKSGEAHQLVDDMPMPANAVILGALLGGCKIHRNTELAEHVLKQLILLEPWNSGNYVMLSNIYSNRGRWEDAAKLRLDMKAKGVEKVPACSWVEFEGKVHEFRVGDKSHPLSDQIYKKLDELGLEMKTMGYEPTTEVVMFDVEDEEKEHTLVHHSEKLAIAFNLLITGPGETIRVTKNLRVCSDCHTAIKLVSRITHREIIVRDNNRFHCFRDGSCSCNDYW

SEQ ID NO: 743 - protein, 643 aa, Oryza sativa
  misc_feature (68)..(68): Xaa can be any naturally occurring amino acid
MPSGGYSSPASPLATASRRSPSSSSTPASSASTSSLASPRSSSAPSPPPPFTSTRSASTASSPTPPTXFTIPIALKSASRLPHPLRAGEQLHARSLKLPSHTNPHVLTSLLSLYAKCGLLHRAQRVFDEMPHPSTVPWTALITAYMDAGDLREAVHVARNAFANGMRPDSFTAVRVLTACARIADLATGETVWRAAEQEGVAQSVFVATAAVDLYVKCGEMAKAREVFDKMRHKDAVAWGAMVGGYASNGHPREALDLFLAMQAEGMKPDCYAVAGALSACTRLGALDLGRQAIRMVDWDEFLDNPVLGTALIDMYAKCGSTVEAWVVFQQMRKKDIIVWNAMILGLGMTGHEKIAFALVGQMEKSGVKLNDNTFIGLLCSCTHTGLIQDGRRYFHNMTKLYHISPRIEHYGCMVDLLSRAGLLQEAHQLVDDMPMPANAVILGALLGGCKIHRNTELAEHVLKQLILLEPWNSGNYVMLSNIYSNRGRWEDAAKLRLDMKAKGVEKVPACSWVEFEGKVHEFRVGDKSHPLSDQIYKKLDELGLEMKTMGYEPTTEVVMFDVEDEEKEHTLVHHSEKLAIAFNLLITGPGETIRVTKNLRVCSDCHTAIKLVSRITHREIIVRDNNRFHCFRDGSCSCNDYW

SEQ ID NO: 744 - protein, 273 aa, Oryza sativa
  misc_feature (228)..(228): Xaa can be any naturally occurring amino acid
MAAKRPAAGEGGGKAAAGAAAAKKRVALVNITNVAAAANNAKFNSATWAAPVKKGSLASGRNVCTNRVSAVKSASAKPAPAISRHESAPQKESVIPPKVLSIVPTAAPAPVTVPCSSFVSPMHSGDSVSVDETMSMCDSMKSPDFEYIDNGDSSSVLGSLQRRANENLRISEDRDVEETKWNKDAPSPMEIDQICDVDNNYEDPQLCATLASDIYMHLREAELHEQPXVLKLERRIGATKLIFVFPRCIDSRFAGPLDEHMAYSGASIDHEQP

SEQ ID NO: 745 - protein, 450 aa, Oryza sativa
  misc_feature (92)..(93): Xaa can be any naturally occurring amino acid
MAAKRPAAGEGGGKAAAGAAAAKKRVALVNITNVAAAANNAKFNSATWAAPVKKGSLASGRNVCTNRVSAVKSASAKPAPAISRHESAPQKXXSFVSPMHSGDSVSVDETMSMCDSMKSPDFEYIDNGDSSSVLGSLQRRANENLRISEDRDVEETKWKKDAPSPMEIDQICDVDNNYEDPQLCATLASDIYMHLREAETRKHPSTDFMETLQKDVNPSMRAILIDWLVEVAEEYRLVPDTLYLTVNYIDRYLSGNEINRQRLQLLGVACMLIAAKYKEICAPQVEEFCYITDNTYFRDEVLEMEASVLNYLKFEMTAPTAKCFLRFYSLLFIVQDPALHLEFLANYVAELSLLEYNLLSYPPSLVAASAIFLAKFILQPAKHPWNSTLAHYTQYKSSELSDCVKALHRLFCVGPGSNLPAIREKYTQHKYKFVAKKPCPPSIPTEFFRD

SEQ ID NO: 746 - protein, 411 aa, Oryza sativa
  misc_feature (378)..(378): Xaa can be any naturally occurring amino acid
  misc_feature (385)..(385): Xaa can be any naturally occurring amino acid
  misc_feature (397)..(397): Xaa can be any naturally occurring amino acid
  misc_feature (411)..(411): Xaa can be any naturally occurring amino acid
MSSNLAASRRSSSSSSVAAAAAAKRPAVGEGGGGGGGKAAAGAAAAKKRVALSNISNVAAGGGAPGKAGNAKLNLAASAAPVKKGSLASGRNVGTNRASAVKSASAKPAPAISRHESATQKESVLPPKVPSIVPTAALAPVTVPCSSFVSPMHSGDSVSVDETMSTCDSMKSPEFEYIDNGDSSSVLGSLQRRANENLRISEDRDVEETKWKKDAPSPMEIDQICDVDNNYEDPQLCATLASDIYMHLREAEVAEEYRLVPDTLYLTVNYIDRYLSGNEINRQRLQLLGVACMLIAAKYEEICAPQVEEFCYITDNTYFRDELFIVQDPALHLEFLANYVAELSLLEYNLLSYPPSLVAASAIFLAKFILQPTKHPWXGLAECRXIDASAVCDICSXCDRLKHDDSARFLX

SEQ ID NO: 747 - protein, 510 aa, Oryza sativa
  misc_feature (510)..(510): Xaa can be any naturally occurring amino acid
MCPLFERLLRKLRSISPIIWSRSLSPGARLDSFLFLFFCVKALRKDITGGRIKGLCYAHTPEDPRVDFIGCLVIQVWQVKGLGQNGPRKCWAVSGRHGYCCMDRWPTHLQENVIRVKLQSQVFYSREGSKPSPCSASDPRRPPPPSQPSQQQQEEEGSGGGCRRPMSSSLASRRSSSSSAAKRPAAGEGGGKAAAGAAAAKKRVALGNITNVAAAANNAKFNSATWAAPVKKGSLASGRNVGTNRVSAVKSASTKPASAISRHESAPQKEASVSVDETMSTCDSMKSPDFEYIDNGDSSSVLGSLQRRANENLRISEDRDVEETKWKKDAPSPMEIDQICDVDNNYEDPQLCATLASDIYMHLREAEVAEEYRLVPDTLYLTVNYIDRYLSGNEINRQRLQLLGVACMLIAAKYKEICAPQVEEFCYITDNTYFRDELFIVQDPALHLEFLANYVAELSLLEYNLLSYPPSLVAASAIFLAKFILQPAKHPWIYAADVIDLNMMIQRDSX

SEQ ID NO: 748 - protein, 497 aa, Oryza sativa
MSSSLASRRSSSSSAAKRPAAGEGGGKAAAGAAAAKKRVALGNITNVAAAANNAVREGSLKFNSATWAAPVKKGSLASGRNVGTNRVSAVKSASTKPASAISRHESAPQKESVLPPKVLRIVPTAAPAPVTVPCSSFVSPMHSGDSVSVDETMSTCDSMKSPDFEYIDNGDSSSVLGSLQRRANENLRISEDRDVEETKWKKDAPSPMEIDQICDVDNNYEDPQLCATLASDIYMHLREAETRKHPSTDFMETLQKDVNPSMRAILIDWLVEVAEEYRLVPDTLYLTVNYIDRYLSGNEINRQRLQLLGVACMLIAAKYKEICAPQVEEFCYITDNTYFRDEVLEMEASVLNYLKFEMTAPTAKCFLRRFVRVAQVSDEDPALHLEFLANYVAELSLLEYNLLSYPPSLVAASAIFLAKFILQPAKHPWNSTLAHYTQYKSSELSDCVKALHRLFCVGPGSNLPAIREKYTQHKYKFVAKKPCPPSIPTEFFRDSTC

SEQ ID NO: 749 - protein, 508 aa, Oryza sativa
MSSNLAASRRSSSSSSVAAAAAAKRPAVGEGGGGGGGKAAAGAAAAKKRVALSNISNVAAGGGAPGKAGNAKLNLAASAAPVKKGSLASGRNVGTNRASAVKSASAKPAPAISRHESATQKESVLPPKVPSIVPTAALAPVTVPCSSFVSPMHSGDSVSVDETMSTCDSMKSPEFEYIDNGDSSSVLGSLQRRANENLRISEDRDVEETKWKKDAPSPMEIDQICDVDNNYEDPQLCATLASDIYMHLREAETRKRPSTDFMETIQKDVNPSMRAILIDWLVEVAEEYRLVPDTLYLTVNYIDRYLSGNEINRQRLQLLGVACMLIAAKYEEICAPQVEEFCYITDNTYFRDEVLEMEASVLNYLKFEVTAPTAKCFLRRFVRVAQVSDEDPALHLEFLANYVAELSLLEYNLLSYPPSLVAASAIFLAKFILQPTKHPWNSTLAHYTQYKSSELSDCVKALHRLFSVGPGSNLPAIREKYTQHKYKFVAKKPCPPSIPTEFFRDATC

SEQ ID NO: 750 - protein, 370 aa, Oryza sativa
MARLSKILSKWGQKKMSNFRLQLQIANEIILRFDVAQEIRILSDLERQLRAALKGRCLALASLERIRIRQRARVRNLREGDASTAYFFMKMKSHQRKLKILWLEHDGVIATTQEDMEQMAKTHFEYVMGASQGDLKQILFQEIHLARANLSELDDAFTEEEVWATIKAMQNEKSPGPDGFTGLFYQRCWDVIKKEVLEALHKFCTGNSQNLELLNTAIITLLPKKDAPTLLKDFRPISLIHSFAKLATKILALRLAPRMDELVAHSQSAFIRGRSIHENFIFVKGLATQFHRNHKAMLLFTLDISKAFDSVSWSFLLNMLRFRGFGPKWRSWVAALFLTAETRVDLNGALGESFKPQKGPTKWTSTVPSC

SEQ ID NO: 751 - protein, 1242 aa, Oryza sativa
  misc_feature (1019)..(1019): Xaa can be any naturally occurring amino acid
  misc_feature (1024)..(1024): Xaa can be any naturally occurring amino acid
  misc_feature (1028)..(1028): Xaa can be any naturally occurring amino acid
  misc_feature (1050)..(1050): Xaa can be any naturally occurring amino acid
  misc_feature (1053)..(1053): Xaa can be any naturally occurring amino acid
  misc_feature (1066)..(1066): Xaa can be any naturally occurring amino acid
  misc_feature (1159)..(1159): Xaa can be any naturally occurring amino acid
  misc_feature (1188)..(1188): Xaa can be any naturally occurring amino acid
MAVTSDTVLDPLGGKSRGDSASIGAIATDDGPSREPAWTVQEVLVTEDGLAAEDGPTDGDGPADGDGLSAIVLPATEDGLLATPARLTRPVGLTEFPLVYSRRRCPAQAVAVDQGALAAVGRRAREERATDENEAPPEVQARISAFISSISTTPPPSILGGPPASVPVTRTRRRATILEGFTPWRSPRLALQGNGTRRHTISKAQKVTMKKLGIIEEEEEANQEAVQEFEKLFDEPLPPHHVQAIAELLQIDMAAPLQPLPEVLPGVEESKLSAVNQSLIYELCGLDFDGFVFLPAEETRGGVIIAWKSALFRGDVVHIGTWSVTVNLCWLAANRSWSLTSVYGPQGDEEKLLFLEELSVIREICLGEWLIAGNFNLIAAAEDKNNSRINRRLLNAFRSKINDLELKEMYMFGRRYTWSSEQARPTLVKLDRILVTTSWEDLFPEAHLQALSSSNSDHCPLLLTCGEFKPISRRFRFETFWTKLDGFMEVVKESWERSVDSTDPFCILYVKMARLSKILSKWGQKKMSNFRLQLQIANEIILRFDVAQEIRILSDLERQLRAALKGRCLALASLERIRIRQRARVRNLREGDASTAYFFMKMKSHQRKLKILWLEHDGVIATTQEDMEQMAKTHFEYVMGASQGDLKQILFQEIHLARANLSELDDAFTEEEVWATIKAMQNEKSPGPDGFTGLFYQRCWDVIKKEVLEALHKFCTGNSQNLELLNTAIITLLPKKDAPTLLKDFRPISLIHSFAKLATKILALRLAPRMDELVAHSQSAFIRGRSIHENFIFVKGLATQFHRNHKAMLLFTLDISKAFDSVSWSFLLNMLRFRGFGPKWRSWVAALFLTAETRVDLNGALGESFKPQKGLRQGDPLSPLLFVPLVHEVEAVKALLNLFGTATGLHINFSKSAVTPIRCAESQKTLAQNTLACRLEDFPITYLGLPLSIRKPTKAEVQPTLDKMAKKVAALWDELQLVQLQQGVEDSILWKFSTNGQFSVASAYEFFFLTAVRCPYGEXDLEGXGTSXRSLVFAEVLAQRRQNLSLPEWXGSXRGAVFRRATGVLXDTLFLLGALSNEAMGEFFQLWDEVHDFSLLPSPDEIRWKLTGDGKFSAASAYDVFFIAAEDCPYGELLWRSRAPSRVRFFMWLALKDRCLTAXTILRSEIGRTTPSARCVREKTRIATTCLXPVLLRRRYGERSEDGAMQTLQSRQTVTADLLTGGLQRDAVFGRATKWTSTVPSC

SEQ ID NO: 752 - protein, 608 aa, Oryza sativa
  misc_feature (11)..(12): Xaa can be any naturally occurring amino acid
  misc_feature (245)..(245): Xaa can be any naturally occurring amino acid
  misc_feature (263)..(263): Xaa can be any naturally occurring amino acid
  misc_feature (268)..(268): Xaa can be any naturally occurring amino acid
PGLQEFGTRHXXIESRNNGLEMQSVNNKGLVEELEKLLDRLRIPQEFAASLTGGSFEESRMLKNVEACEWLTGAIRSLEVPNLDPCYVNMRAVREKRAELEKLKTTFVRRASEFLRNYFSSLVDFMISDKSYFSQRGQLKRPDHADLRYKCRTYARLLQHLKSLDKSCLGPLRKAYCHSLNLLLRREAREFANELRASTKAPKNPAVWLEGSNSGGQNGSTDTSTVSDAYSKMLTIFIPLLVDEXSSFFAHFMCFEVPALVPXAGASXNAKSRSGGNDPDDDLNLMDPDGNDLKPDDTSAELGTLNDALQELLDGIQEDFYAVVDWAYKIDPLRCISMHGITERYLSGQKADAAGFVRRLLHDLESRISTQFSRFIDEACHQIERNERNVRQTGILAYIPRFAVLASRMEQYIQGQSRDLIDKAYTKLVSTMFTTLDKIAHSDPKTADIVLIENYAAFQNSLYDLANVVPTLAKFYHEASESYEQACTRHISSLIYLQFERLFQFSRKVDELTYTIAAEEIPFQLGLAKTDLRRVIKSSLSGIDKSIGAMYRRLQKTLTSDELFPSLWDKCKKEFLDKYESFVQMVTRIYGNEPIMSVADMKDVLANF

SEQ ID NO: 753 - protein, 579 aa, Oryza sativa
  misc_feature (88)..(88): Xaa can be any naturally occurring amino acid
  misc_feature (117)..(117): Xaa can be any naturally occurring amino acid
  misc_feature (150)..(150): Xaa can be any naturally occurring amino acid
  misc_feature (187)..(187): Xaa can be any naturally occurring amino acid
  misc_feature (577)..(577): Xaa can be any naturally occurring amino acid
MAAAAAEAFGTAAATSTPPVQATRQDVQAAIAKAVELRALHAALLQREAAAPAPAAARPSSASRRPRPPRSPGRGRRRRRWPPSTRTXPAYDEEQMAGLSHNNRSRSENWSGIALGXAAAAATTTTTRPSPTTTTSTPSRPRTASSASRXVHRPSPAAQGPPGDHGRHGGAAQGAVDVRQRVPAGDXIGRDHGIDVGALKFLASSGAPLSAAAAAAQPRPAKHRRAQILSWLFPRAKKKAKPMSPSAIERENMSQLLKEWGLLSLDSLRRELADANAHRDAALQEAAEMRSSLGELTTKLAGLEAYCSELKKALRLATSSTSNAQPSSSSMSRRSTRSPVSHEAMVEGFLQIASEARLSVKQFCKALIQQVEEPDNGLIEKLNILLQPYQLMITDNKHCSKLVLYHLEALMNQAMYQDFENCTFQKNGSPRCLDPKQGSQESFASFVALRNLSWNEVLRKGTKYYSEDFSRFCDQKMSCIVSTLKNWSRPWPEQLLQCFFVAAKCVWLLHLLAFSFTPALTIMRVEESRVFDQMYMEDILPDKQQLHNPCQVKIMVMPGFYVQYRVLKCRVLTTYKXHN

SEQ ID NO: 754 - protein, 496 aa, Oryza sativa
MAVMEEQQEGAAGVMRRRPKTKIVCTLGPASRSVEMIGRLLRAGMCVARFNFSHGSHEYHQETLDNLRAAMESTGILCAVMLDTKGPEIRTGFLKDGKPVQLKKGQEITVSTDYSIKGDDNMISMSYKKLAVDLKPGSVILCADGTITLTVLHCDKEQGLVRCRCENTAMLGERKNVNLPGVIVDLPTLTEKDKEDILKWGVPNKIDMIALSFVRKGSDLVEVRKVENQEGVANFDDILAQSDAFMVARGDLGMEIPIEKIFYAQKVMIFKCNIQGKPVVTATQMLESMIKSPRPTRAEATDVANAVLDGTDCVMLSGETAAGAYPELAVRTMAKICLQAESCVDHAAVFKSITASAPIPMSPLESLASSAVRTANSAKAALILVLTRGGTTARLVAKYRPSMPILSVVVPELKQTDSFDWTCSDEAPARHSLIVRGVIPMLSAATAKAFDNEATEEALGFAISNAKAMGLCNSGESVVALHRIGTASVIKLLTAN

SEQ ID NO: 755 - protein, 507 aa, Oryza sativa
MEEQQEGAAGVMRRRPKTKIVCTLGPASRSVEMIGRLLRAGMCVARFNFSHGSHEYHQETLDNLRAAMESTGILCAVMLDTKGPEIRTGFLKDGKPVQLKKGQEITVSTDYSIKGDDNMISMSYKKLAVDLKPGSVILCADGTITLTVLHCDKEQGLVRCRCENTAMLGERKNVNLPGVIVDLPTLTEKDKEDILKWGVPNKIDMIALSFVRKGSDLVEVRKVLGKHAKSIMLMSKVENQEGVANFDDILAQSDAFMVARGDLGMEIPIEKIFYAQKVMIFKCNIQGKPVVTATQMLESMIKSPRPTRAEATDVANAVLDGTDCVMLSGETAAGAYPELAVRTMAKICLQAESCVDHAAVFKSITASAPIPMSPLESLASSAVRTANSAKAALILVLTRGGTTARLVAKYRPSMPILSVVVPELKQTDSFDWTCSDEAPARHSLIVRGVIPMLSAATAKAFDNEATEEALGFAISNAKAMGLCNSGESVVALHRIGTASVIKLLTAN

SEQ ID NO: 756 - protein, 943 aa, Oryza sativa
MVIRSFKHIVRAVIAAVDDMQNMSAAIAETLNILLGCPRLESDTETDAHSEHNLRFRWVERFLSKRYNWKLKDEFAHLRKFIILRGLCSKVGLELVARDYDMNSPNPFDKSDIVNIIPVCKHVVYSSIDGRNLLESSKMALDKGKLDDAVNFGTKALSKIVAVCGPYHRLTANAYSLLAVVLYHTGDFNQATIYQQKALDINERELGLDHPETMKSYGDLSVFYYRLQHIEMALKYVNRALYLLQFSCGLSHPNSAATYINVAMMEEGMGNVHVALRYLHEALKCNKRLLGADHIQTAASYHAIAIALSMMDAYSLSVQHEQTTLQILQEKLGQDDLRTQNNIRAHQGELVEEKESFEHDIGSPHEANKEEFQQVKLKAHPPAISEENYAIHDELKQVDPLSPEEYSDEGWQAANLRGRSANVRKKSSRRRPALTKLMVDRLEDGRTGSAYRAGVQQHMKGDKEDVINSSSQLSFGSFLKTDKVNGNSSNIEDKVFNAISKPERGIKLSGINRPATIASKLVSYKDVAVSPPGTVLKPILEQKEAKEKDNAQNTDLIVSSEEEDKKLTDEDEEKEKPSHDSSKEVLSSEPEEIGNDEKAPDSNSDESPTESKKKGGSKLSASAPPFNPGSLLSMSHPYSTVAIYDASVVLQPIPSQPMEILPHAIDTRVPRGPRSTLYYRTGHTFQRKQGYAHSQSTILRGSNSPPTMNPHAAEFVPGKTSQQPDVANREPSADVSVTDSADQLLAPQTSDEVKAGMPAAEQAIQGESTSPCKGKENRAKDALRNSCKTELARQILFSFIVKSVHDSLGSTGAESDRKPSGPDESGNAQSSNNINKSPSGRKELDKQQKATVVPKINLAATEQRRSRVSSRPDVNWFTVTESEIPPCMLPLAMLRMMLYCCAMLAIPAASLHYSLQRLFIYGVGVRFRRGSEDGMALAWHGAA

SEQ ID NO: 757 - protein, 1324 aa, Oryza sativa
MKDLEKSTSLEVDDSTIDGDVDLGGGLTVVGRKRKDGRGSVDENGASTKRILRSNSMKMHVDAETAGGVALDVCKGDILEKKQCDIIAEGDRGGVLTVDTCNAEEDGEVTGAVVSDAVVEAVRCSANNVESLGLAEVEIAEGNGLDADIQESDGEMDKADDKLSTPSEEQNESGGGTSVGGINDSQENKGVNGLCQGEVIDPLATANGDELSMGLSRSASGRESIEQEDTVMCASDDQKVENHCQFDDKHKEAEISQIELAVDNHIMLTDCTNQKKGIDSPVNETKGDSTPDIVFIRRKSITRKTCEAKQVKSEDEVRFEKRVTRSATVRQREVSASMCVGATNDANLESKERKEDVHHYTRKVGSTVRSKVHHTGVAECDTDTKKKLKGTVTTRRNSDAIANDDPPSITQNKESKTQMKIDIKSQPLTRRGSIVNKTEDAVSGLDQNICSSAITDKNDIELTDSEGVKSENKAAVRKSILSVGAKIVASKKRILESGLDKASGESPVAIPSLKKARDTSSDTELEQPKMSSGKKLTRNNCGSSKKGMSTRRQHQSQTAKLSTSVNCSNKNESKLSQNESDDDGTGSDTSLKNTCVRRTRSGGVVPKKQEDSSESEEPIILRKNHQRGKYSGKRAGSTPRKVKAPKGNRKEVKASSLKSSGPSEQINTGSLREEKQKISDHIKGMLLDAGWTIDLRPRNGRNYLDSVYIPPSGKGSYWSVTKAYAVFLEGMESEKKGRAKDQRPSKKSVGSPGKSHVSEEILSKLKRIVVNKRRTKVELQKLKKRKHGLLKKQKTSKRNSRGSKNKISNSRKLHLGSERKKRGGCALLARGSNKDGGSSTNGFVPYEWKRTVLSWLIDLDIIDINAKLKCVDETHSKVLLEGVTTRDGINCRCCSKVFTVLEFVAHAGGPVSKPYRNVLVDGLDTDLLHCLINAWDKQSDSERQAFFPISTETDDPNDDTCGICGDGGNLICCDGCPSTFHMSCLELEALPSDDWRCAKCSCKFCQEHSRQDAQDIAEVDSSLCTCSQCEEKYHPGCSPETTNTSNVSSQACDLFCQQSCRLLFEGLRNLLAVKKDLEPEFSCRIIQRIHENVPETVVALDERVECNSKIAVALSLMDECFLPIVDQRTGINLIRNVVYNCGSNFVRMDFHGFYIFVLERGDEIIAAASVRIHGTKLAEMPFIGTRNMYRRQGMCRRLLDGIEMILSSLNVEKLIIPAIAELVDTWTSKFGFSSLDVSEKQEVKSTSMLVFPGTGLLQKPLLKKTSPGENSSSQEVDGVFSELESGKTSNVANEDSLCSANAETQGSAAPCYGDNSKDASACND

SEQ ID NO: 758 - protein, 128 aa, Oryza sativa
  misc_feature (128)..(128): Xaa can be any naturally occurring amino acid
SPSSMSGAGAGEAGVRTVVWFRRDLRVEDNPALAAAARAAGEVVPVYVWAPEEDGPYYPGRVSRWWLSQSLKHLDASLRRLGASRLVTRRSADAVVALIELVRSIGATHLFFNHLYGSIPISSSRTAX

SEQ ID NO: 759 - protein, 150 aa, Oryza sativa
  misc_feature (150)..(150): Xaa can be any naturally occurring amino acid
MSASPSSMSGAGAGEAGVRTVVWFRRDLRVEDNPALAAAARAAGEVVPVYVWAPEEDGPYYPGRVSRWWLSQSLKHLDASLRRLGASRLVTRRSADAVVALIELVRSIGATHLFFNHLYAPLNLAVGQGFRNGVCVLWFTVLATRRMVNX

SEQ ID NO: 760 - protein, 945 aa, Oryza sativa
  misc_feature (925)..(925): Xaa can be any naturally occurring amino acid
  misc_feature (945)..(945): Xaa can be any naturally occurring amino acid
MAPKGAGRGKGRGGGGGGKGDKRKKEEKAVVPSAIDVTVVTPYESQVTLKGISTDRVLDVRKLLGSNVETCHLTNYSLSHVTRGQRLEDGVEIVSLKPCSLTIVEEEYATEAAAAAQVRRLLDIVACTTAFVNKPPPDAHGAGAAQAPPISEAHDMAAIRPPPRLGEFYDFLSFAHLTPPVHCKAERKESNGASQEGDYFEIEVKVCNGKLLHIVASVKGFYSAGKPHTVSHSLVDLLQQLSSAFANAYDALMKAFLDHNKVVIFGNLPYGFRANTWLIPPIYLDSATKCPALPVEDENWGGNGGGNGRDGKYDRRRWAKEFSTLARMPCKTEEGRVIRDRKAFLLHNLFVDTAIFRAASTIQRLIDLSGNSTSQQAGLDGSLAIEERVGDLLITVKRDQADASLKLEDKVDGVALYQSSMDISQRNLLKGLTSDESVVVKVISTNMITIQDTSILGVVIVKHCGYTATVKVSGRTKDGNDGISNVDVDDLPDGGSNALNINSLRISLPKIVNSDIASTQCPTPQSHVDNHARKLVRKILEDSLMKLENMPANNPRTIRWELGSSWLQNLQKKDSPASEDKKNAGHVEKETTIKGLGKHFEQLKKIKKKECHVEGAMSEKEDSDSNCSVINGMEESENTKETDISKLMSEDDFCRLKDLGAGLHQKSLEELTMMAHKFYDDTALPKLVADFASLELSPVDGRTMTDFMHTRGLNMCSLGRVVKLAEKLPHIQSICIHEMVIRSFKHIVRAVIAAVDDMQNMSAAVGLELVARDYDMNSPNPFDKSDIVNIIPVCKHVVYSSIDGRNLLESSKMALDKGKLDDAVNFGTKALSKIVAVCGPYHRLTANAYSLLAVVLYHTGDFNQATIYQQKALDINERELGLDHPETMKSYGDLSVFYYRLQHIEMALKYVNRALYLLQFSVGFXHPNSAATYINVAMRKRYGKX

SEQ ID NO: 761 - protein, 992 aa, Oryza sativa
  misc_feature (972)..(972): Xaa can be any naturally occurring amino acid
  misc_feature (992)..(992): Xaa can be any naturally occurring amino acid
MAPKGAGRGKGRGGGGGGKGDKRKKEEKAVVPSAIDVTVVTPYESQVTLKGISTDRVLDVRKLLGSNVETCHLTNYSLSHVTRGQRLEDGVEIVSLKPCSLTIVEEEYATEAAAAAQVRRLLDIVACTTAFVNKPPPDAHGAGAAQAPPISEAHDMAAIRPPPRLGEFYDFLSFAHLTPPVHCKAERKESNGASQEGDYFEIEVKVCNGKLLHIVASVKGFYSAGKPHTVSHSLVDLLQQLSSAFANFGNLPYGFRANTWLIPPIYLDSATKCPALPVEDENWGGNGGGNGRDGKYDRRRWAKEFSTLARMPCKTEEGRVIRDRKAFLLHNLFVDTAIFRAASTIQRLIDLSGNSTSQQAGLDGSLAIEERVGDLLITVKRDQADASLKLEDKVDGVALYQSSMDISQRNLLKGLTSDESVVVKVISTNMITIQDTSILGVVIVKHCGYTATVKVSGRTKDGNDGISNVDVDDLPDGGSNALNINSLRISLPKIVNSDIASTQCPTPQSHVDNHARKLVRKILEDSLMKLENMPANNPRTIRWELGSSWLQNLQKKDSPASEDKKNAGHVEKETTIKGLGKHFEQLKKIKKKECHVEGAMSEKEDSDSNCSVINGMEESENTKETDISKLMSEDDFCRLKDLGAGLHQKSLEELTMMAHKFYDDTALPKLVADFASLELSPVDGRTMTDFMHTRGLNMCSLGRVVKLAEKLPHIQSICIHEMVIRSFKHIVRAVIAAVDDMQNMSAAIAETLNILLGCPRLESGTETDAHSEHNLRFRWVERFLSKRYNWKLKDEFAHLRKFIILRGLCSKVGLELVARDYDMNSPNPFDKSDIVNIIPVCKHVVYSSIDGRNLLESSKMALDKGKLDDAVNFGTKALSKIVAVCGPYHRLTANAYSLLAVVLYHTGDFNQATIYQQKALDINERELGLDHPETMKSYGDLSVFYYRLQHIEMALKYVNRALYLLQFSVGFXHPNSAATYINVAMRKRYGKX

SEQ ID NO: 762 - protein, 1103 aa, Oryza sativa
  misc_feature (581)..(582): Xaa can be any naturally occurring amino acid
  misc_feature (820)..(821): Xaa can be any naturally occurring amino acid
  misc_feature (1087)..(1087): Xaa can be any naturally occurring amino acid
  misc_feature (1103)..(1103): Xaa can be any naturally occurring amino acid
MLSSDVRTNDIRRTHCVRRLIVLLPSCRFGMKKICSIDPCLQRESCTKHENLQRRHRCSTKHGVFCNISETLKATADIKYAGVKISRSGHEPHEHPGVSYLGQIRFRFGRYQQSIIVCFIQRPIKPSSEPHGRQTERERERGLRADAPFVAVGFGASGAMAPKGAGRGKGRGGGGGGKGDKRKKEEKVVPSAIDVTVVTPYESQVTLKGISTDRVLDVRKLLGSNVETCHLTNYSLSHVTRGQRLEDGVEIVSLKPCSLTIVEEEYATEAAAAAQVRRLLDIVACTTAFVNKPPPDAHGAGAAQAPPISEAHDMAAIRPPPRLGEFYDFLSFAHLTPPVHFIRRKESNGASQEGDYFEIEVKVCNGKLLHIVASVKGFYSAGKPHTVSHSLVDLLQQLSSAFANFGNLPYGFRANTWLIPPIYLDSATKCPALPVEDENWGGNGGGNGRDGKYDRRRWAKEFSTLARMPCKTEEGRVIRDRKAFLLHNLFVDTAIFRAASTIQRLIDLSGNSTSQQAGLDGSLAIEERVGDLLITVKRDQADASLKLEDKVDGVALYQSSMDISQRNLLKGLTSDESVVVXXDTSILGVVIVKHCGYTATVKVSGRTKDGNDGISNVDVDDLPDGGSNALNINSLRISLPKIVNSDIASTQCPTPQSHVDNHARKLVRKILEDSLMKLENMPANNPRTIRWELGSSWLQNLQKKDSPASEDKKNAGHVEKETTIKGLGKHFEQLKKIKKKECHVEGAMSEKEDSDSNCSVINGMEESENTKETDISKLMSEDDFCRLKDLGAGLHQKSLEELTMMAHKFYDDTALPKLVXXLAEKLPHIQSICIHEMVIRSFKHIVRAVIAAVDDMQNMSAAIAETLNILLGCPRLESGTETDAHSEHNLRFRWVERFLSKRYNWKLKDEFAHLRKFIILRGLCSKVGLELVARDYDMNSPNPFDKSDIVNIIPVCKHVVYSSIDGRNLLESSKMALDKGKLDDAVNFGTKALSKIVAVCGPYHRLTANAYSLLAVVLYHTGDFNQATIYQQKALDINERELGLDHPETMKSYGDLSVFYYRLQHIEMALKYVNRALYLLQFSVGFXHPNSAATYINVAMRKX

SEQ ID NO: 763 - protein, 292 aa, Oryza sativa
MEQYEKVEKIGEGTYGVVYKGKHRHTNETIALKKIRLEQEDEGVPSTAIREISLLKEMQHRNIVRLQDVVHKEKCIYLVFEYLDLDLKKHMDSSPDFKNHRIVKSFLYQILRGIAYCHSHRVLHRDLKPQNLLIDRRTNSLKLADFGLARAFGIPVRTFTHEVVTLWYRAPEILLGARHYSTPVDMWSVGCIFAEMVNQKPLFPGDSEIDELFKIFSIMGTPNEETWPGVASLPDYISTFPKWPSVDLATVVPTLDSSGLDLLSKMLRLDPSKRINARAALEHEYFKDLEVA

SEQ ID NO: 764 - protein, 287 aa, Oryza sativa
  misc_feature (1)..(1): Xaa can be any naturally occurring amino acid
  misc_feature (206)..(206): Xaa can be any naturally occurring amino acid
  misc_feature (208)..(208): Xaa can be any naturally occurring amino acid
XFQEERILSTVETQCAYELMDQIKMESDSRHGKLAAALESTKSEVIFLKASLFDKDSELRRALDANEKLQSETRTDNELKEQLQGALLENGQLKRELQQHTSEKKASAKATDAADAAAEAAKKGEMEAELRRLRVQAEQWRKSAETAMALLTVGNNGKVVDRSESLEGGGGGGGKYAGLWDELDDDAAARKNGNVLRRISGMWKKXGXSESNCARYALGNLLIFSRVVVNSFCRLLWYKRKKEKNIGVCLYWLGVNVLIAVSYVVYEGLIHPGVTDWIRLFVSFRQF

SEQ ID NO: 765 - protein, 153 aa, Oryza sativa
  misc_feature (102)..(102): Xaa can be any naturally occurring amino acid
  misc_feature (146)..(146): Xaa can be any naturally occurring amino acid
  misc_feature (153)..(153): Xaa can be any naturally occurring amino acid
MASTDPLLGGKEEEEGGGEVRRARRWWVGRVVNTEEAWAQTRFAVPMVLTNMSYYAIPLVSVMFSGHLGDVHLAGATLGNSWATVTGYAFVTGMSGALETLXGQAYGARMYRMLGLYLQSSLLMSAAVSVLVSALWCFTEPLLLLXRQDPAVX

SEQ ID NO: 766 - protein, 167 aa, Oryza sativa
  misc_feature (22)..(22): Xaa can be any naturally occurring amino acid
  misc_feature (167)..(167): Xaa can be any naturally occurring amino acid
GGDGRERGAGRGGGGGGGAGGXLKKGPWTTAEDAVLVQHVRQHGEGNWNAVQRMTGLLRCGKSCRLRWTNHLRPNLKKGSFSPDEELLIAQLHAQLGNKWARMASHLPGRTDNEIKNYWNTRTKRRQRAGLPVYPPDVQLRGSSEQDDWSLDGAACQWDNISGGICX

SEQ ID NO: 767 - protein, 212 aa, Oryza sativa
  misc_feature (212)..(212): Xaa can be any naturally occurring amino acid
MARKQHIAIFTTASLPWMTGTAVNPLFRAAYLAKAGDWEVTLVVPWLSKGDQLLVYPNKMKFSVPGEQEGYVRRWLEERIGLLPKFEIKFYPGKVIRLSAATQEVPRSIVCNVHGVNPKFIEIGKLKHQQISQREQAFFKGAYYIGKMVWSKGYTELLQLLQKHQKELSGLKMELYGSGEDSDEVKASAEKLNLDVRVYPGRDHGDSIFHEX

SEQ ID NO: 768 - protein, 596 aa, Oryza sativa
  misc_feature (502)..(502): Xaa can be any naturally occurring amino acid
TRPNLKRHPLHGTRLPLLPPLRLLPSTSAAAPIAQLCAVGVVSVPMARKQHIAIFTTASLPWMTGTAVNPLFRAAYLAKAGDWEVTLVVPWLSKGDQLLVYPNKMKFSVPGEQEGYVRRWLEERIGLLPKFEIKFYPGKFSTEKRSILPAGDITQTVSDDKADIAVLEEPEHLTWYHHGRRWKNKFRKVIGVVHTNYLEYVKRERNGYIHAFLLKHINSWVTDIYCHKVIRLSAATQEVPRSIVCNVHGVNPKFIEIGKLKHQQISQREQAFFKGAYYIGKMVWSKGYTELLQLLQKHQKELSGLKMELYGSGEDSDEVKASAEKLNLDVRVYPGRDHGDSIFHDYKVFINPSTTDVVCTTTAEALAMGKIVICANHPSNEFFKRFPNCHMYNTEKEFVRLTMKALAEEPIPLSEELRHELSWEAATERFVRVADIAPIMSIKQHSPSPQYFMYISPDVKKNMEEASAFFHNAISGFETARCVFGAIPNTLQPDEQQCKELXLEAPGMTVISSHAVVNDNRMPTNSPGNLAWGTNYVTQLSFAPKLRRTEQTRVILVFCYGGTLVLQFSFTIVECPSDISYCNASYLGIVNVRQLK

SEQ ID NO: 769 - protein, 451 aa, Oryza sativa
  misc_feature (1)..(1): Xaa can be any naturally occurring amino acid
  misc_feature (410)..(410): Xaa can be any naturally occurring amino acid
XYRIWEEEIEKWQNPILKNEKLPECWGYCLDSITFVDGQPPVIDEKPSPGSNQQKSSKRGTRDTKQESVKDNHVKLTAEQVTNGGDLANGEEQSVSKYAAVHGPQMAKATNGLGSQEPIPYLLSKNGPENVGKFLYLEGVEYIMWCTYDVHFYASFALLDLFPKIELSIQRDFANAVLYEDRRRMKFLADGTSGIRKAAATMAHRLGDRPFAEKYKLKFIQAKAVYEAKLWNGSYFNYDSGTSSNSRSIQADQLAGQWYAASSGLPPLFDENKIRSALQKIFEFNVMKVKGGRLGAVNGMTPNGKVDETCMQSREIWTGVTYGVAANMLLHGMEHQGFTTAEGIFIAGWSEEGYGYWFQTPEGWTIDGHYRSLIYMRPLAIWAMQWARSPPKAILDAPKTSVLPHRPLVXEQKNSSARISLSPPPASAACHHSPRRRRGSTFFHRRLVVLA

SEQ ID NO: 770 - protein, 445 aa, Oryza sativa
  misc_feature (439)..(439): Xaa can be any naturally occurring amino acid
MAKATNGLGSQEPIPYLLSKNGPENVGKFLYLEGVEYIMWCTYDVHFYASFALLDLFPKIELSIQRDFANAVLYEDRRRMKFLADGTSGIRKVKGAVPHDLGTHDPWHEMNAYNIHDTSKWKDLNPKFVLQVYRDFAATGDMSFGRDVWPAVCAVMDYMNQFDRDGDGLIENDGFPDQTYDAWTVHGISAYCGGLWLAALQAAATMAHRLGDRPFAEKYKLKFIQAKAVYEAKLWNGSYFNYDSGTSSNSRSIQADQLAGQWYAASSGLPPLFDENKIRSALQKIFEFNVMKVKGGRLGAVNGMTPNGKVDETCMQSREIWTGVTYGVAANMLLHGMEHQGFTTAEGIFIAGWSEEGYGYWFQTPEGWTIDGHYRSLIYMRPLAIWAMQWARSPPKAILDAPKVNLMDRIHLSPQMIRAMNEINVRKIAPDNRCFPSSXAFRCEC

SEQ ID NO: 771 - protein, 413 aa, Oryza sativa
MGFSAKWRDWVALILSASSSRVSLNGIEGERIDHRRGLRQGDPLSPYLFILAMDPLHRLLKIATDEGHLSELADRSARFRCSLDADDAAIFIKPSRQDVDSLILILNGFGGATSLQVNLQKSSVLPISCDAYLGMPLTVSRLRKVHLQYLIDRIKARLASWKKKLLSAGGRRELVLSVLSSMPIYVMTALKIPKQIIQEIDKARRKFLWDGGDEFHGGKCKVNWQRVCRPIKYGGLGVSNLTKMGRALHLRWLWYEWTFPDKPWIGMPTPCDEQDAELFAASTTVTIGDSRKALFWESPWVSSSPLKTMAPNLYRHARRKKRTVANALQDNKWINDIRHNLTSMLVTEFFKPEEDGRVVDGWRGEAAVGSGGDGAAGEATVPEAEVKVEELGVDAAGEESRRRGEVRVAIAMD

SEQ ID NO: 772 - protein, 971 aa, Oryza sativa
  misc_feature (66)..(66): Xaa can be any naturally occurring amino acid
  misc_feature (83)..(83): Xaa can be any naturally occurring amino acid
  misc_feature (103)..(103): Xaa can be any naturally occurring amino acid
  misc_feature (120)..(121): Xaa can be any naturally occurring amino acid
  misc_feature (435)..(436): Xaa can be any naturally occurring amino acid
  misc_feature (772)..(772): Xaa can be any naturally occurring amino acid
MGRHQRSGSLSVTSSATPSSVDFAAAADVGCPFGRVDALGPVELRETAYEIFFMSCRSSSGGNTAXRSRGVVAGGRAEGRRRXSRVKKALGLKARRLSSSSAXDGGAADDGAHAEPDVGXXASPGRGRRPMTSAEIMRQQMRVTEQSDARLRRTLMRAVVGQVGRRPDTIVLPLELLRQLKPAEFADGEEYHQWQFRQVKLLEAGLILHPSLPLDRLNSAVLRFREVMRATEIRAIDTAKSSDAMRTLTSAVHALAWRSGVGSGGGDACHWADGYPLNVLLYASLLHAIFDHRDCTVVLDEVDELLDLIRKTWPTLGVTRPVHNVCLAWAFFQQYVVTGQVEPELAAAALAVLADVAADARGTRDAVYGKALLGALGAMQEWSEKRLLDYHDSYEKGIGGAPTEVMEILLSISLAAGKIIADRDAAADADDAANXXAGDRVDYYIRCSMKNAFTKILESGMGDGDGEPGVVLTQLARDTEELAVVERRSFSPVLRRRHPAPVAVAAVTLHGCYGVVLRQYLGKVTILTEELVRVLQSAGRMEKAMAHMTAEDAADCRDGAKAIVGDMEPYEVDSVVMGLLKVWMDDRFKITMDCLARAKETESWIPKSKDEPFAGSAMEMMKLAKYTVEEFSEIPASAKDEVVQDLVDGLEAIFQEYISFVASCGAKQNYLPPLPPLTRCNQDSGFFKLWRKTVPCQAPEGGPRGVGVGGGSHHVPRPSISRGTQRLYVRLNTLEYVLTHLHAIDKSLVAAPSPRFDGARAAAKSAIARVAXGAAFRLVFLDSRHSFYHGLYLRGVADTRIRPALRALKQNLTFLVSVLADRAQPVAVREVMRASFEAFLMVLLAGGGDRSFARGDHAMVEEDFRSLRRAFCTCGEGLVPEEVVAREAEAAERVVELMARPTDALIDAFGVATSESSDDGDGGYGGVTPVPPTSRRWDAADANTILRVLCHRDDEAASQFLKRTFQLAKRR

SEQ ID NO: 773 - protein, 121 aa, Oryza sativa
  misc_feature (112)..(112): Xaa can be any naturally occurring amino acid
  misc_feature (121)..(121): Xaa can be any naturally occurring amino acid
MAGDPAAAAAAVGAMRPWNYVVTAHKLGQTDELSRDYNITWMTAVEMLDDYVYIGADNCYNLFTVLKRRVGRLLVIGQYHLGDLVNRFHQGPLVMQDPGSEVDQIPAFIFGXKQNRLNAIX

SEQ ID NO: 774 - protein, 184 aa, Oryza sativa
  misc_feature (1)..(1): Xaa can be any naturally occurring amino acid
  misc_feature (40)..(41): Xaa can be any naturally occurring amino acid
  misc_feature (158)..(158): Xaa can be any naturally occurring amino acid
XELSRDYNITWMTAVEMLDDYVYIGADNCYNLFTVLKRRXXGRLLVIGQYHLGDLVNRFHQGPLVMQDPGSEVDQIPAFIFGTASGAIGVIASLPHYSLLFLEKLQLVLADYIKSVGNLTHAQWRAFCTDGRSVGAAQGFVDSDLIESFLSLEPSKMXEEVARMVWLHADELCKSISNSLSIPL

SEQ ID NO: 775 - protein, 368 aa, Oryza sativa
  misc_feature (45)..(45): Xaa can be any naturally occurring amino acid
  misc_feature (237)..(238): Xaa can be any naturally occurring amino acid
  misc_feature (366)..(366): Xaa can be any naturally occurring amino acid
STRAHTHARTYIARATPRHAAVTPFQATLTRTRVAATTLSWLSRXKASSPSSPAASSSSSSAPAKLGAAPGRVAVRKLTAAATSLRLDRAPAARANGARAVPVSRTMSRLMEKGKTAFIPYITAGDPDMGTTAEALRLLDACGADVIELGVPFSDPYNDGPVIQASAARALSAGATMDGIMSMLAEVTPELSCPVVLFSYLGPIVRRGPANFTAAAKEAGVQGLIVPDLPYLEACSXXRSEVIKNNLELVLLTTPTTPPDRMKAITAASGGFVYLVSVNGVTGSRQDVNPRVEHLLQEIKQVTDKAVCVGYGISTPDHVRQIAEWGADGVIIGSAMVRQLGEAASPKQGLKRLEKYARSLKNALPXKL

SEQ ID NO: 776 - protein, 119 aa, Oryza sativa
  misc_feature (47)..(48): Xaa can be any naturally occurring amino acid
MVLDATYLKAISRRATLYEMIRDYGQAANDLRKLISLIEKQANNSGXXGIEPSSSPADIKKAYRKAALRHHPDKAAQLLVRNEKPDDGLRDVAKEVHADADHLFKAIGEAYNVLSDSDK

SEQ ID NO: 777 - protein, 593 aa, Oryza sativa
  misc_feature (10)..(10): Xaa can be any naturally occurring amino acid
CGGLLGRNSXAVTTCRLPLTNQWDTQQIKTKKLNNAALETCETWRTSGNQAYTNGHFATAEEYYTRGINSVSGHDSSGYCSRALMLCYSNRAATRMSLGRMREALQDCLIATSIDPTFLKAKVRAANCQLALGDLEDALRSYTACLTSSKTSGSDRKMLAEASDGLERVQSVVDWISLSEELLKKRTVSEATTALQFISNALHISSHSDKLMEMKAEALLTLRKYEEVIQLCQETVVLAEKNSSASETTEWSGRLWRTYLICKTYFLSGKLEDALELLNKHQQVTNVKESEGRTSQECFSSLSTTIRELLSHKAAGNEAFQARRYSEAVEQYSAALARNSDSRPFSAVCFCNRAASYQALGQVTDAIADCSLAMVLDATYLKAISRRATLYEMIRDYGQAANDLRKLISLIEKQANNSGLSPKVLNKHSDLKQARTRLLSVEDEAKRDTPLNLYLILGIEPSSSPADIKKAYRKAALRHHPDKAAQLLVRNEKPDDGFWRDVAKEVHADADHLFKAIGEAYNVLSDSDKRQEYDIEENLRNATKRVSKGGRMHRSPEQRYTKQYDRGFNPRPWQSNRSSGSRSRWSGYDDDYW

SEQ ID NO: 778 - protein, 1683 aa, Oryza sativa
  misc_feature (1330)..(1331): Xaa can be any naturally occurring amino acid
  misc_feature (1683)..(1683): Xaa can be any naturally occurring amino acid
MGREALTYHPADHHSGARRPPSKPQFGSWRDVVKKDRGLAAAEEAAWTEVRRKGSTEHSLRAGDPTSNKQDRAFKPRKEFSNHDRAFNSEKEIPRWLLGRCFKCLGLGHRKLDCKGETSVGVSGEEGGLWGQSGAAVRLGAERWPSGRREQQGKVKQVVVREVPPAKSKIVKPAPQATEKGAVIAMAGANLGGYQICAATPPQFVEKYRIGEPDSWLERGRVVLSWTSGMERHERYLQELSLMASVLKGRPPVSPAELAETIELHTGVQQRYFRVEVTRPEDFLISFRNQREKEAVLRCSKALFCNEVPVSFKPWNRCCWAEASAFQFFTKISLDGLPPHAWEEEAMHKLVNSLDGQLAELIPAADARCLGLFAWFKNPSDLPHHLDVEIPERPAAGRWREGTSATPPSPPREKPALTYPVIIHVEEVIDPTPLHTPPTSFDDNSDDEDVTRRNTFSCWAGRYDGAGPWPTEVGGGHVYGGATGSAGGLGARSFAPIPGEVSAPPRRLLQRLATMPAAGQSVTEESQDDAVLTAAVVGVIDMAAADRVLDRADIVVQDMEAGEVLASQPHSPTLVLQAPGVWFSPQAVQAVEQPGADVGIPTPLAAPVVATAKALIVLDDDCSWALVAGGVSPLSSPLQLSLDELTGGELSALGTENDGDRAELSDEVREATVDHVHVHGDDLASGQEVALTPNGGYALTRVASASPRIRASQSSFGTLAKKLSFEDTMAEVSLVEHGCERPALKATGDALSSTQESRSDRGFESAAKAGEFRVYVRKQAQKKPSHEQPGPEGIGLMGLAGQDLGQADLGRAVAGVGQEMSVGQVVCGEDEPPQAHQEEVAHSDDERPVQETEIESSREALSGEMMLPPPASPSTALARARPTSEGSPANTPLPPEADQILQGFLASVATEPPPSLLGRRPPASVPKSKPRRRNVIPEGFTPWRSPRLQQQGNGARRHSTSKAQKVTMKKMGIIEEEEEADQDTFQQYTTVFDQPLSTQHMKALAELLDVDVALEEADVPPPDLASLVAAGGSVFRGSQVHLGQWSVTAKLEWTAGNHSCFLTSVYGPQDDNEKILFLEELAEIRGICGEVWLVAGDFNLIAAAADKNNSRVNRRLMNAFRNKINELELKELYLFGRRYTWSSEQQFPTLVKSDRVPVSTEWEDAFPDAHLQALSSSSSDHCALLLSCGETPRGRRRFRFETFWTKLEDFDQVVADSWQQTVESTDPYVILYVKMARLAMSLCSWGQKKISRFRLQLQIANELIFRFDVAQENRLLSPLERRFRAILKGRCLALASLERIRVRQRARISQLREGDANSKYFHMKVNARRXXLEVPFSEEEVWKVIKEMPNEKAPGPDGFTGLFYQRCWQVIKGEVLAALTKFHSGNHQNLDNLNTAVITLLPKKDAPTLIKDYRPISLIHSFSKLATKILASRLAPRMGDLVAENQTAFIRGRSIHENFIFVRGLALQFHRRKKPMILLKLDITKAFDTVSWCFLLNLLRNRGFGSRWRSWIAALLLTSETRILLNGHESDSFKPARGLRQGNPLSPLLFQPIEREATAVNAILQLFGKATGLKTNLSKSALTPIRCDDDVLVGVQQLLGCRVENFPITYLGLPLSLRRPTKAEVQPILDQLSKKVAGWKPKLLSPDGRLRLIKSVLTALPVHFMFVLVLPKWAIKEFNKKCX

SEQ ID NO: 779 - protein, 731 aa, Oryza sativa
MDYECCSYGHAIFSGNAPSLKDTTFAIVDVFTGTSVSPPPCPFFTFVNSCALTAPLDYHNSHFLVEAKHSLFAWRVGSDHWSQCSCPPNSKALEQFVPFKGQLYALEYQQLYTVKLEPQLSLEEVQVVWSVEMSEPDLCEPSLVVCDDMLILLAASIGEAFCLDLSSQPAMWVKMEEEELKEWAFFFDEKREAFRPRPPLSCKNPQRWGGIGYDSYCVSSLAPNQGNRRGLLPNWQQLPPASSSKPRRPPPHRSHGGYKNGTVSVDSGAPHDARGLRALIKALAAEHGEAAPAVHAHAAKLGLDRRRAVRDGLVELYLARGELASARALVDGFPAGRDVVSCTAMVTGHARHGFLDEAVVLFFAMADDRCVAIDAVAAAAAFSACAQIGDLALGREAHRRVAERKVAMDVVAWNALVDMYAKCGDAAAAHRWFRRMPVKKNVVSWNTMMSAFARAGELEEALALFQEMQAAAVRPDDATFVAALGACAQLGALDTGRWLHAYMGRMGHSADGVVGNALLDMYAKCGAVDQATEVFDGMARRDVYTYTSMILGLAMHGRGEDALSLFAGMQRAGVTPNEVTLLGVLTACCHAGLVEEGLQQLNAMPEPRIEHYGCVVDMLGRAGRLDKAEELIAAMPVHSDALIWSSLLAACRAHGDVERAERVMRRRVADADAGDYVLMSNTYASNGRHGEAVKVRGQMRRNEIDKVPGCSLIEIDGVVHEFKAIPANSIR

SEQ ID NO: 780 - protein, 179 aa, Oryza sativa
MHGHGEDALSLFAGMQRAGVTPNEVTLLGVLTACCHAGLVEEGLQQLDAMPEPRIEHYGCVVDMLDRAGRLDEAEELVAAMPAHPDALIWGSLLAACRAHDDVERAERVMWRRTTDADADAGDYVLMSNTYASNGRHGEVVKVRRQMRRNEIDKVPDCSLIEIDGVVHEFKAIPANSIR

SEQ ID NO: 781 - protein, 395 aa, Oryza sativa
  misc_feature (65)..(66): Xaa can be any naturally occurring amino acid
  misc_feature (234)..(235): Xaa can be any naturally occurring amino acid
  misc_feature (304)..(305): Xaa can be any naturally occurring amino acid
  misc_feature (395)..(395): Xaa can be any naturally occurring amino acid
MVASSASLLLFTLIHPLLCISAQDFLKPGSSLSVQDVLHSPDGTFTCGFYKISPNASTFSIWFSXXLTENPVVWSANPLHPVYTWGSKVELKFDGGMFLKDYAGQIVWANNGSSDTQYAQAQLLDTGNLVVKGESGNTLWQSFDSPTDTLLPTQSITAATKLVSTNRLLVPGHYSFRFDDQYLLSLFDDEKNISFIYWPNPSMTIWAKLRSPFNSTTNGVLDSWGHFLGSDNAXXFIAADWGPGTVRRLTLDYDGNLRLYSLDKNGICVYTPVPACACAPGYEIIDPSDRSKGCSPKVNLSCDXXQKVKFVALRNTDFLGYDLSVYRFVPLGFCKNICLKDCRCKGFAYWEGTGDCYPKSVLLGGVTLSNFGSTGTMYLKLPEGVNVSKLVLATX

SEQ ID NO: 782 - protein, 1100 aa, Oryza sativa
  misc_feature (65)..(66): Xaa can be any naturally occurring amino acid
  misc_feature (234)..(235): Xaa can be any naturally occurring amino acid
  misc_feature (328)..(329): Xaa can be any naturally occurring amino acid
MVASSASLLLFTLIHPLLCISAQDFLKPGSSLSVQDVLHSPDGTFTCGFYKISPNASTFSIWFSXXLTENPVVWSANPLHPVYTWGSKVELKFDGGMFLKDYAGQIVWANNGSSDTQYAQAQLLDTGNLVVKGESGNTLWQSFDSPTDTLLPTQSITAATKLVSTNRLLVPGHYSFRFDDQYLLSLFDDEKNISFIYWPNPSMTIWAKLRSPFNSTTNGVLDSWGHFLGSDNAXXFIAADWGPGTVRRLTLDYDGNLRLYSLDKVDRTWSVTWMAFPQLCKVRGLCGQNGICVYTPVPACACAPGYEIIDPSDRSKGCSPKVNLSCDXXQKVKFVALRNTDFLGYDLSVYRFVPLGFCKNICLKDCRCKGFAYWEGTGDCYPKSVLLGGVTLSNFGSTGTMYLKLPEGVNVSRSSFPHSQPLGPKYGPNCNTTNNISIADFLDTLNSGQSISKFLYFYGFLSAIFLAEVLFVLLGWFILRREAKQLRGVWPAEAGYEMIANHFRRYTYRELVLATRKFKDELGRGASGVVYKGVLKDNRVVAVKKLVDVNEGEEEFQHELSVISRIYHTNLVRVWGFCSDGPHRILVSEFVENGSLDKILFGSGGSQNLLGWTQRFNIALGVAKGLAYLHHECSEWVIHCDMKPENILLGENMEPKIADFGLAKLLNRDGSNIDISRIRGTRGYLAPEWVYSLPITAKVDVYSFGVVLLELLKGARVSELEKNDDEDVKMARRVIRLCSEQLKSDGDDQFWIADFIDTRLNGQFNSAQARMMMELAVSCLEEDRVRRPTMECVVQKLVSVDEVSSTPTGGTTLTDAATNIQYVHTVAVCNKMNNNRSCTTSSISQIGRLSPKTLGNIDCSVGRTEAVARSSHFSPSSTTGLTCRVADVEAGGASVLGGEAADRVVSGRRPCAARGRDRTTRACELLHLLKAGLTVSEEGRPALVDQIRRGGPREVNDRDLPAHIEARDHWCTVMCPCHATVHMAGMVVREETNGGARSGKRLRVSDIDSNSLAVGEDEEVAKHLLDQAKTREMTVKSQQGEKTHGTPAKTMLHQSSAVGKPWPRTPEPMKDMERLAAVATVPNGVETSSKNGRDSNAYLS

SEQ ID NO: 783 - protein, 348 aa, Oryza sativa
  misc_feature (25)..(26): Xaa can be any naturally occurring amino acid
MDDNSIQQSLLADNPNVLQRKPSEXXVNRFRRCRSTPSTDPLQGPPEKGSSVKAKELFKEMRPSFRLVGLLLFIYLLVGVLAFYAVMDEISGKRTNRVLDALYFCVVTMTTVGYGDLVPNNDTTKLLACAFVFMGMAVVALFVSKVADYLVEKQEVLFFKALHTNLKGGETKMLRAIETNRIKYKFYTNALLLVLSIISGTVFLWKVEKLSLVDSFYCVCATITTLGYGDKSFSSKLGRVFAVFWIITSTIIMAQFFMYLAEIYTERRQKMLANWVLTRKMTKMDLEAADLDDDRQVGAAEFVVYKLKELGKINQEEISSFLEEFEKLDVDHSGTLSPYDLTLAQSAQ

SEQ ID NO: 784 - protein, 609 aa, Oryza sativa
  misc_feature (41)..(41): Xaa can be any naturally occurring amino acid
  misc_feature (65)..(65): Xaa can be any naturally occurring amino acid
  misc_feature (176)..(176): Xaa can be any naturally occurring amino acid
  misc_feature (397)..(397): Xaa can be any naturally occurring amino acid
  misc_feature (402)..(402): Xaa can be any naturally occurring amino acid
  misc_feature (406)..(406): Xaa can be any naturally occurring amino acid
METHIGSVDGAAAAADNGAVGCPASAVGCPMTSARPAPVSXRRGVAGTAPGEAAGAGGRQRRVRXVPGDFNLTLLDHLIAEPGLRLVGCCNELNAGYAADGYARARGVGACAVTFTVGGLSVLNAIAGAYSENLPVICIAGGPNSNDYGTNRILHHTIGLPDFSQELRCFQTVTCXTQAVVTNLEDAHEQIDTAIATALRESKPVYLSISCNLPGLPHPTFSRDPVPFFLAPRLSNKMGLEAAVEATVEFLNKAVKPVLVGGPKLRVAKAGKAFVDLVDASGYAYAVMPSAKGLVPETHPHFIGTYWGAVSTAFCAEIVESADAYLFAGPIFNDYSSVGYSFLLKKDKAIIVQPERVIVGNGPAFGCVMMKEFLSELAKRVNKNTTAYENYKRIFVXLRASXAGEXEPNEPLRVNVLFKHVQKMLNSDSAVIAETGDSWFNCQKLKLPEGCGYEFQMQYGSIGWSVGALLGYAQGAKDKRVIACIGDGSFQVTAQDVSTMIRCAQNSIIFLINNGGYTIEVEIHDGPYNVIKNWNYTGLVDAIHNGEGKCWTSKVKCEEELTEAIGMALGEKDCLCFIEVIAHKDDTSKELLEWGSRVSAANSRPPNPQ

SEQ ID NO: 785 - protein, 499 aa, Oryza sativa
  misc_feature (60)..(60): Xaa can be any naturally occurring amino acid
  misc_feature (66)..(66): Xaa can be any naturally occurring amino acid
  misc_feature (108)..(108): Xaa can be any naturally occurring amino acid
  misc_feature (473)..(473): Xaa can be any naturally occurring amino acid
RTRGPDLHHRHHLRLVSIATTSSRRRRRHRRDAEPPPPHLRRGLRRPPAEGARASRRSRXRSPCAXSASAAAVAPRRETDPRKRVVITGMGLVSVFGNDVDAYYDRLXLAGESGIGPIDRFDASNFPTRFAGQIRGFSSEGYIDGKNDRRLDDCLRYCIVSGKKALESAGLALGSKSMDKIEKTRAGVLVGTGMGGLTVFSDGVQNLIEKGHRKITPFFIPYAITNMAPALLGMDIGFMGPNYSISTACATSNYCFYAAANHIRRGEADVMIAGGTEAAIIPIGVGGFVACRALSQRNDDPKTASRPWDQDRDGFVMGEGAGVLVMESLEHAMKRDAPIIAEYLGGAVNCDAYHMTDPRSDGLGVSSCIKQSLADAGVAPEEVNYINAHATSTLAGDLAEVNAIRQVFKDPSEIKINATKSMIGHCLGAAGGLEAIATVKAITTGWVHPSINQFNPEPAVEFDTVPNVKKQHXEVNVGISNSFGFGGHNSVVVFAPFKP

SEQ ID NO: 786 - protein, 1448 aa, Oryza sativa
  misc_feature (622)..(622): Xaa can be any naturally occurring amino acid
  misc_feature (642)..(642): Xaa can be any naturally occurring amino acid
  misc_feature (721)..(722): Xaa can be any naturally occurring amino acid
  misc_feature (1448)..(1448): Xaa can be any naturally occurring amino acid
MKAGGVRLGPSGVEITRCISEKTGMESDARFKPRRSHNILQGSAWRFCVCVLYVSRFHVHVAPVTTKQFFPPLVVASSPIHAATTTDPRLRCRSARRGLPNYLHRGLRPTAPPPPPFRSAGQPQRHRQPRAAPPPSNHAAASTVPRSQPTSAPPPAPSRASSVQPRRRLHRSAPSGNFSAAATPEPHLLRPTAPPPPPICATEQPQRRRHPQAAPPPTIRVAASTDLRRRPRMDGDGFDDLNVWATQLSASGPATAPSAGAGFDLNSQAPAAEGFPGLGMYGAFLQGDNDELLTSRGRGSSLPPYRHRALVTEEEMVAPSQAGCLRGEAGAFDSAHVRSPRHLAARASAATRRYVPAAAASAYRVPGHRGQQGVPSVGKHPAPALPSTMKMKNWRMMWRSLRASADPRPVKKSKSPMLKIVKDIASTFKEAVIVNTKQMQKRASDKAAFSVKRCQELAFECGVEQTIESVSAMSKMFETEYQREFFCGQLTPDLRLAHDIIVPKDPTFSEVHPNLENPAFWPHFNDCIGAIDGTHVNVVVPKSKRVPYLNRHNETSQNVLAVCDFDMRFTFVLSGWPGSAHDMRVFKNAAFEQQVAASERRVAFRNGEATTPEPQNPTNPPXAGFSPPPPPTRRTPTTTRRXEEARVPAENSRPRAATGPRPAPGYTAVSAVIEKKEDGPGCRCGHTLTAVPAVGEEGTPGYIGPRLILFGGATALEGNSXXTPPSSAGSAGIRLAGATADVHCYDVLSNKWSRLTPQGEPPSPRAAHVATAVGTMVVIQGGIGPAGLSAEDLHVLDLTQQRPRWHRVVVQGPGPGPRYGHVMALVGQRFLLTIGGNDGKRPLADVWALDTAAKPYEWRKLEPEGEGPPPCMYATASARSDGLLLLCGGRDANSVVFVNARLHVSGGALGGGRMVEDSSSVAVLDTAAGVWCDTKSVVTTPRIGRYSADAAGGDAAVELTRRCRHAAAAVGDQIFIYGGLRGGVLLDDLLVAEDLAAAETTTAANHAAASAAATNVQSGRTPGRYAYNDERARQTAPESAQDGSVVLGTPVAPPVNGDMYTDISPENAVLQGQRRLSKGVDYLVEASAAEAEAISATLAAVKARQVNGEMEQLPDKEQSPDSASTSKHSSLIKPDSILSNNMTPPPGVRLHHRAVVVAAETGGALGGMVRQLSIDQFENEGRRVSYGTPENATAARKLLDRQMSINSVPKKVIASLLKPRGWKPPVRRQFFLDCNEIADLCDSAERIFSSEPSVLQLKAPVKIFGDLHGQFGDLMRLFDEYGAPSTAGDIAYIDYLFLGDYVDRGQHSLETMTLLLALKVEYPQNVHLIRGNHEAADINALFGFRIECIERMPDRVMEFCNNNDLQLIVRAHECVMDGFERFAQGTANNAGAILVLGRDLVVVPKLIHPLPPAITSPETSPEHHIEDTWMQSKVICVCETVAHSHAKX

SEQ ID NO: 787 - protein, 1022 aa, Oryza sativa
  misc_feature (12)..(12): Xaa can be any naturally occurring amino acid
  misc_feature (45)..(45): Xaa can be any naturally occurring amino acid
  misc_feature (65)..(65): Xaa can be any naturally occurring amino acid
  misc_feature (144)..(145): Xaa can be any naturally occurring amino acid
  misc_feature (789)..(789): Xaa can be any naturally occurring amino acid
EDEIVSMCRNNXSACREFDRAIGPPSPPPRSRPARAPNHPTNPPXAGFSPPPPPTRRTPTTTRRXEEARVPAENSRPRAATGPRPAPGYTAVSAVIEKKEDGPGCRCGHTLTAVPAVGEEGTPGYIGPRLILFGGATALEGNSXXTPPSSAGSAGIRLAGATADVHCYDVLSNKWSRLTPQGEPPSPRAAHVATAVGTMVVIQGGIGPAGLSAEDLHVLDLTQQRPRWHRVVVQGPGPGPRYGHVMALVGQRFLLTIGGNDGKRPLADVWALDTAAKPYEWRKLEPEGEGPPPCMYATASARSDGLLLLCGGRDANSVPLASAYGLAKHRDGRWEWAIAPGVSPSPRYQHAAVFVNARLHVSGGALGGGRMVEDSSSVAVLDTAAGVWCDTKSVVTTPRIGRYSADAAGGDAAVELTRRCRHAAAAVGDQIFIYGGLRGGVLLDDLLVAEDLAAAETTTAANHAAASAAATNVQSGRTPGSPACRDRRAGQTAPESAQDGSVVLGTPVAPPVNGDMYTDISPENAVLQGQRRLSKGVDYLVEASAAEAEAISATLAAVKARQVNGEMEQLPDKEQSPDSASTSKHSSLIKPDSILSNNMTPPPGVRLHHRAVVVAAETGGALGGMVRQLSIDQFENEGRRVSYGTPENATAARKLLDRQMSINSVPKKVIASLLKPRGWKPPVRRQFFLDCNEIADLCDSAERIFSSEPSVLQLKAPVKIFGDLHGQFGDLMRLFDEYGAPSTAGDIAYIDYLFLGDYVDRGQHSLETMTLLLALKVEYPQNVHLISWXNHEAADINALFGFRIECIERMGERDGIWTWHRMNRLFNWLPLAALIEKKIICMHGGIGRSINHVEQIENLQRPITMEAGSVVLMDLLWSDPTENDSVEGLRPNARGPGLVTFGPDRVMEFCNNNDLQLIVRAHECVMDGFERFAQGHLITLFSATNYCGTANNAGAILVLGRDLVVVPKLIHPLPPAITSPETSPEHHIEDTWMQELNANRPPTPTRGRPQVAANDRGSLAWI

SEQ ID NO: 788 - protein, 669 aa, Oryza sativa
VADASALPYSYSPLPAGDAASADLAAARRSRRRPLCVALFLASAAVILAVAVLSGVRLAGRPATTTMVVPGVVEMEMASRGPESGVSEKTSGAEEMVRLMGGAAGGEAFPWSNAMLQWQRTGFHFQPERNWMNGPVYYKGWYHLFYQYNPDGAVWGNKIAWGHAVSRDLVHWRHLPLAMVPDQWYDVNGVWTGSATTLPDGRLAMLYTGSTNASVQVQCLAVPSDPDDPLLTNWTKYHANPVLYPPRTIGDRDFRDPTTAWRDPSDGDWRIVIGSKDEHHAGIAVVYRTADFVTYDLLPGLLHRVEATGMWECIDFYPVAGGEGVDMTEAMYARNKGVVHVMKASMDDDRHDYYALGRYDPARNAWTPLDAAADVGIGLRYDWGKFYASKTFYDPAKRRRVLWGWVGETDSERADVAKGWASLQSIPRTVELDTKTGSNLLQWPVEEVETLRTNSTDFGGITVDYASVFPLNLHRATQLDILAEFQLDPLAVDAVLEADVGYNCSTSGGAAGRGALGPFGLLVLADKRHRGDGEQTAVYFYVAKGSDGGVTTHFCQDESRSSHADDIVKRVVGNVVPVLDGETFSLRVLVDHSIVESFAQGGRSTATSRVYPTEAIYANAGVFLFNNATSARVTAKKLVVHEMDSSYNQAYMDFVSRSISTDRLITISP

SEQ ID NO: 789 - protein, 662 aa, Oryza sativa
METRDDVADASALPYSYSPLPAGDAASADLAAARRSRRRPLCVALFLASAAVILAVAVLSGVRLAGRPATTTMVVPGVVEMEMASRGPESGVSEKTSGAEEMVRLMGGAAGGEAFPWSNAMLQWQRTGFHFQPERNWMNDPNGPVYYKGWYHLFYQYNPDGAVWGNKIAWGHAVSRDLVHWRHLPLAMVPDQWYDVNGVWTGSATTLPDGRLAMLYTGSTNASVQVQCLAVPSDPDDPLLTNWTKYHANPVLYPPRTIGDRDFRDPTTAWRDPSDGDWRIVIGSKDEHHAGIAVVYRTADFVTYDLLPGLLHRVEATGMWECIDFYPVAGGEGVDMTEAMYARNKGVVHVMKASMDDDRHDYYALGRYDPARNAWTPLDAAADVGIGLRYDWGKFYASKTFYDPAKRRRVLWGWVGETDSERADVAKGWASLQSIPRTVELDTKTGSNLLQWPVEEVETLRTNSTDFGGITVDYASVFPLNLHRATQLDILAEFQLDPLAVDAVLEADVGYNCSTSGGAAGRGALGPFGLLVLADKRHRGDGEQTAVYFYVAKGSDGGVTTHFCQDESRSSHADDIVKRVVGNVVPVLDGETFSLRVLVDHSIVESFAQGGRSTATSRVYPTEAIYANAGVFLFNNATSARVTAKKLVVHEMDSSYNQAYMA

SEQ ID NO: 790 - protein, 249 aa, Oryza sativa
  misc_feature (232)..(232): Xaa can be any naturally occurring amino acid
MGRGKIEIKRIENTTNRQVTFCKRRNGLLKKAYELSVLCDAEVALIVFSSRGRLYEYANNSVKSTVERYKKANSDTSNSGTVAEVNAQHYQQESSKLRQQISSLQNANSRTIVGDSINTMSLRDLKQVENRLEKGIAKIRARKNELLYAEVEYMQKREVELQNDNMYLRSKVVENERGQQPLNMMGAASTSEYDHMVNNPYDSRNFLQVNIMQQPQHYAHQLQPTTLQLGQXSRPSISFGVDTVRTHVR

SEQ ID NO: 791 - protein, 438 aa, Oryza sativa
MCTYQILDLLKIQGPEIRTGFLKDGKPVQLKKGQEITVSTDYSIKGDDNMISMSYKKLAVDLKPGSVILCADGTITLTVLHCDKEQGLVRCRCENTAMLGERKNVNLPGVIVDLPTLTEKDKEDILKWGVPNKIDMIALSFVRKGSDLVEVRKVLGKHAKSIMLMSKVENQEGVANFDDILAQSDAFMVARGDLGMEIPIEKIFYAQKVMIFKCNIQGKPVVTATQMLESMIKSPRPTRAEATDVANAVLDGTDCVMLSGETAAGAYPELAVRTMAKICLQAESCVDHAAVFKSITASAPIPMSPLESLASSAVRTANSAKAALILVLTRGGTTARLVAKYRPSMPILSVVVPELKQTDSFDWTCSDEAPARHSLIVRGVIPMLSAATAKAFDNEATEEALGFAISNAKAMGLCNSGESVVALHRIGTASVIKLLTAN

SEQ ID NO: 792 - protein, 309 aa, Oryza sativa
  misc_feature (293)..(293): Xaa can be any naturally occurring amino acid
MAAAARSLAASATASASLGLGVARSSARPRSPFGRGLALRGLSSSSSSFAATAAVMGKAAAEAADAGMDAVQQRLMFEDECILVDEQDNVIGHDSKYNCHLMEKINSGHVLHRAFSVFLFNSKYELLLQQRSATKVTFPLVWTNTCCSHPLYRESELIEDKSLGVRNAAQRKLFDELGIQAEELPVDQFIPLGRMLYKAPSDGKWGEHELDYLLFMVRDVELSPNPEEVADVKYVNRDELKELLKKADAGEGGIKLSPWFRLVVDNFLMGWWDHVEQGTLEEAIDMKTIHKLXSINRWATSLENKELLL

SEQ ID NO: 793 - protein, 139 aa, Oryza sativa
  misc_feature (1)..(1): Xaa can be any naturally occurring amino acid
XGGRDCHISSYCNQSRYDCITYGDWGGYRCSFYGNRDDIAIGGRGRDYNAYWMSACEMLDDEIYIGAENNYYIFTARKNSDASTDEQRGRLEVVGEYHLGREANRLRRGSLVMRVPDSKMGQNPTGIFGTINGVIGIIA

SEQ ID NO: 794 - protein, 111 aa, Oryza sativa
  misc_feature (23)..(23): Xaa can be any naturally occurring amino acid
  misc_feature (29)..(30): Xaa can be any naturally occurring amino acid
  misc_feature (39)..(40): Xaa can be any naturally occurring amino acid
  misc_feature (76)..(77): Xaa can be any naturally occurring amino acid
  misc_feature (102)..(102): Xaa can be any naturally occurring amino acid
  misc_feature (104)..(104): Xaa can be any naturally occurring amino acid
  misc_feature (111)..(111): Xaa can be any naturally occurring amino acid
ACSGSFLPIMLLPLLLAGAAVAXGARGAXXAGAGLADAXXGQQQQQCWEVLMEIKSCTGEILLFFINGEAYLGPGXXRAIRVIEQSCWATDAMLSVIGFTPXEXDMLKGYX

SEQ ID NO: 795 - protein, 396 aa, Oryza sativa
  misc_feature (1)..(1): Xaa can be any naturally occurring amino acid
XERAERSKLRMSPMLATLPDVTAVLMGMARTRFLAPRAAASAASAVSAKPAAVAPLYADRTVVRIGLPSKGRMSEQTLSLLKSCQLSVRHLNPRQYTADIPQVPNLEVWFQRPKDIVRKLQSGDLDLGIVGFDIVSEYGQGSDDLVVVHDALEFGHCRLSLAVPKEGIFENINTLEDLANMPEWTQERPLRVVTGFGYLGEKFMRENGFNHVSFLAGDGALESYPAMGMADVIVDLVSSGTTLRENNLKEIDGGVVLESQATLVACRRSLHKRNGVLEITHEMLERLEAHLTATGEIMVTANMRGNSAEEVAERVLSQTSLCGLQGPTISPVYRSRDGKVAVEYYAINVVVPQKSLYKSIQQLRSIGGSGVLVTKLTYIFDEETPRWRKLLSELGL

SEQ ID NO: 796 - protein, 182 aa, Oryza sativa
  misc_feature (13)..(14): Xaa can be any naturally occurring amino acid
  misc_feature (38)..(39): Xaa can be any naturally occurring amino acid
  misc_feature (61)..(62): Xaa can be any naturally occurring amino acid
  misc_feature (84)..(84): Xaa can be any naturally occurring amino acid
  misc_feature (91)..(91): Xaa can be any naturally occurring amino acid
  misc_feature (97)..(97): Xaa can be any naturally occurring amino acid
  misc_feature (122)..(122): Xaa can be any naturally occurring amino acid
  misc_feature (176)..(176): Xaa can be any naturally occurring amino acid
  misc_feature (182)..(182): Xaa can be any naturally occurring amino acid
PYLDILHLLPRFXXRNTCGNASVLCTQIITETNLICSXXKKTTKKKEQTKTKKKKKKLNIXXGEDFIRERHEVAFLTQSDANYXKNVLSLXFDGAKXLLIVTDRDKGCRYLTKDFKGSVPGXWSVNTVDTTGAGDALGGSLLVNVGKDDSIFHNEEKLREALKFSNACGPICTTNXVAIPAX

SEQ ID NO: 797 - protein, 694 aa, Oryza sativa
MSGAIASSPAATLFLAGSSSSSPRRRRSRVSGVWWHLYGGTGLRLHWERRGLVRDGAVVCSASAAGGEDGVAKAKTKSAGSSKAVAVQGSTAKADHVEDSVSSPKYVKPAVAKQNGEVVSRATKSDAPVSKPKVDPSVPASKAEADGNAQAVESKAALDKKEDVGVAEPLEAKADAGGDAGAVSSADDSENKESGPLAGPNVMNVIVVASECSPFCKTGGLGDVVGALPKALARRGHRVMVVIPRYGEYAEAKDLGVRKRYRVAGQDSEVSYFHAFIDGVDFVFLEAPPFRHRHNDIYGGERFDVLKRMILFCKAAVEVPWFAPCGGSIYGDGNLVFIANDWHTALLPVYLKAYYRDNGLMQYTRSVLVIHNIAHQGRGPVDDFATMDLPEHYIDHFRLYDPVGGEHSNVFAAGLKMADRAVTVSHGYLWEIKTMDGGWGLHEIINHNDWKLQGIVNGIDMAEWNPEVDEHLQSDGYANYTFETLDTGKKQCKEALQRQLGLQVRDDVPLIGFIGRLDHQKGVDIIGDAMPWIAGQDVQVVMLGTGRPDLEEMLRRFESEHNDKVRGWVGFSVQLAHRITAGADVLLMPSRFEPCGLNQLYAMAYGTVPVVHAVGGLRDTVAPFDPFADTGLGWTFDRAEANRMIDALGHCLNTYRNYKESWRGLQARGMAQDLSWDHAAELYEDVLVKAKYQW

SEQ ID NO: 798 - protein, 1090 aa, Oryza sativa
MSVWNYVVTAHKPTSVTHSCVGNFTGPNQLNLIVAKCTRIEIHLLTPQGLQPMIDVPIYGRIATLELFRPHNETQDFLFIATERYKFCVLQWDGEKSELLTRAMGDVSDRIGRPTDNGQIGIIDPDCRLIGLHLYDGLFKVIPFDNKGQLKEAFNIRLEELQVLDIKFLYGCVKPTIVVLYQDNKDARHVKTYEVALKDKDFVEGPWSQNNLDNGAGLLIPVPAPLGGVIIIGEETIVYCNANSTFRAIPIKQSIIRAYGRVDPDGSRYLLGDNAGILHLLVLTHERERVTGLKIEYLGETSIASSISYLDNGVVYVGSRFGDSQLVKLNLQADPNGSYVEVLERYVNLGPIVDFCVVDLDRQGQGQVVTCSGAFKDGSLRVVRNGIGINEQASVELQGIKGLWSLKSSFNDPYDMYLVVSFISETRFLAMNMEDELEETEIEGFDAQTQTLFCQNAINDLLIQVTANSVRLVSCTSRELVDQWNAPEGFSVNVASANASQVLLATGGGHLVYLEIKDSKLVEVKHIQLEHEISCVDLNPIGENPQYSSLAAVGMWTDISVRILSFPDLELIRKENLGGEIVPRSVLLCTLEGVSYLLCALGDGHLFSFLLNASTGELTDRKKVSLGTQPISLRTFSSKGTTHVFASSDRPTVIYSSNKKLLYSNVNLKEVNHMCPFNTAAIPDSLAIAKEGELSIGTIDDIQKLHIRTIPLDHQTRRICHQEQSRTLAFCSFKHNQTSIEESETHFVRLLDHQTFEFLSIYQLDQYEHGCSIISCSFSDDNNVYYCVGTAYVLPEENEPSKGRILVFAVEDGRLQLIVEKETKGAVYSLNAFNGKLLAAINQKIQLYKWMLREDGSHELQSECGHHGHILALYTQTRGDFIVVGDLMKSISLLVYKHEESAIEELARDYNANWMSAVEMLDDEIYIGAENNYNIFTVRKNSDAATDEERGRLEVVGEYHLGEFGNRFRHGSLVMRLPDSEMGQIPTVIFGTINGVIGIIASLPHEQYVFLEKLQSTLVKFIKGVGNLSHEQWRSFHNDKKTSEARNFLDGDLIESFLDLSRNKMEEVAKGMGVPVEELSKRVEELTRLH

SEQ ID NO: 799 - protein, 403 aa, Oryza sativa
  misc_feature (307)..(307): Xaa can be any naturally occurring amino acid
  misc_feature (315)..(315): Xaa can be any naturally occurring amino acid
  misc_feature (327)..(327): Xaa can be any naturally occurring amino acid
AHTTAGADTASPRRPAAAADMDPSAPSGSSADASASSSSSAVEDLAPGMAAMSLQDRFELLRGIGEECIQEDELMNLLQKKPVPICYDGFEPSGRMHIAQGIVKTINVNKMVRAGCKVKIWIADWFAQLNNKMGGDLKKIQTVGRYMIEIWRAAGMNLDGVEFLWSSEEINNRANEYWPLVMDIACKNNVKRIMRCCQIMGRNDSDELTAAQIFYPCMQCADIFFLKADICQLGMDQRKVNVLAREYCTDIKRKNKPIILSHHMLPGFKEGQEKMSKSDPSSAIFMEDDEAQVNLKIKQAFCPPNVXVDGNPMLXEYIKYIVFPWFXEMFEVVRKEANGGNKTFTNMDELIDDYKTGALHPADVKPALAKAINQILQPIRDHFNNNSEAKILLNTVKKYRVTN

SEQ ID NO: 800 - protein, 1316 aa, Oryza sativa
  misc_feature (76)..(76): Xaa can be any naturally occurring amino acid
  misc_feature (90)..(90): Xaa can be any naturally occurring amino acid
  misc_feature (104)..(104): Xaa can be any naturally occurring amino acid
  misc_feature (178)..(178): Xaa can be any naturally occurring amino acid
  misc_feature (383)..(384): Xaa can be any naturally occurring amino acid
  misc_feature (844)..(844): Xaa can be any naturally occurring amino acid
  misc_feature (852)..(852): Xaa can be any naturally occurring amino acid
  misc_feature (865)..(865): Xaa can be any naturally occurring amino acid
  misc_feature (1108)..(1108): Xaa can be any naturally occurring amino acid
  misc_feature (1117)..(1117): Xaa can be any naturally occurring amino acid
  misc_feature (1163)..(1163): Xaa can be any naturally occurring amino acid
LGSFISTVIGNIKLSISNIHIRYEDTERYLNPYSNPGHPFAAGLALSKLSAFTVDDRGKETFATGGDLDRVKKVYXVLVLTNLIILNSSXLLFGYRYLYATHYXTFWKVKLGHGHQFQCHLVDSVELESLALYFDSDSSPWSVDKSWEDLLPSEWSQYFRFLSSESRTVLILLQKHTXYILRPISGKAKYTKIQLDEAKKTGQALQNAAVDLDDVTLSLSKDGYRDVLKMADNFSSFNQRLKYAHYRPSLPVKSDPRSWWKYAYKVVVHETKKARYMAVGIVLTFVLFHGVLPRLYQLFYVDIPNGCSGNLSWEQLLKNARLRKTYVSVYASLLKSDMSRLVVDDNEDIKKLDRELDIEVILQWRMLAHKFVEQSAETHQYAXXQNKQQSWWSFGCRTGSSKDEGDSKSFSDEDWERLNRIIGYKENDDYIPVQQDMKLMQFYFEIRMKHNASKLIIDNSEYLADLSCEDFCCNLKMYPEAKIFDLKLGSYKLLSPYGLLAEYLKDSIDQIVAFFKSSPTISQTLAIETAAAVQEIWDSRASEEQDMYLNFNLVLSDVSAFLVDGDYHWNERSNEVNLLSVIDKCGIALKLQQIQLESALYPSTRMAVRVPSLGFHFSPARYHRLMEIFKIFQDNDSDKNSSDLAHLWDQADFEGWSSLLTWKNREATWQRRYLRLVGPFLYVFDNPTSTTYKQWSSLRNKQVHQVPMELTSGVQNILALHDSGQVNPKILEDTGALIMLFDNEEARRIWQNRLQGAIYRASGSAALSSFPEVAFPSETHSFKGSFQDVSIEKLFVAGILDELKICFSCGYESNHKLKKVLLAKESSLFEFRAVGGQIPGWREXEITFCHDXFIKLRFFFVETNXVELSMKGGNLLIGTILRSLEIEDVQTNEVPTPSRKNSAGPRGTALKKSDSEERFFEASEILMNSTSLPSLQPPAFSRIPGLLPDIELQSAGFTSGDITFESFVKAQIVIYDQQSPQYNNLDNRVVISVATLTFFCHRPTVIAIMEFMNAINLANVPDADKNKDTTSDPVEHNMVEEPKSDLEAGPVIKRLLAKGKSRTVFHLTSSMAEAQILLMNENGDRLATLSQNNLSTDIKVCSHRRSVXRLHLETLKXAMTVFLAIIPTFGFVICVIQEEVLLWRYYHLINFYFWLERKQTTFXFFVQIDFSSYNVDDEDYSGYDYSLSAQLSEVRIVYLNRFVQEIINYFMGLVPKSSDSVVKLKDNVTNSEKWVSKTDMEGSPALKLDVSFSRPIIVMPRETNSSDFLELDVLYIKIQNKFQWIGGDKNEMSAIHLEILTVTVSSLCQHVYLFPC

SEQ ID NO: 801 - protein, 515 aa, Oryza sativa
  misc_feature (57)..(57): Xaa can be any naturally occurring amino acid
  misc_feature (263)..(264): Xaa can be any naturally occurring amino acid
  misc_feature (452)..(453): Xaa can be any naturally occurring amino acid
  misc_feature (503)..(503): Xaa can be any naturally occurring amino acid
SKLEASVFLPAHKSKPSRRRRSLPPAAAAAMDAGETSTSDSLVLATGAAQGPKRKPXPKRFVHTPIPPSILSDPTLAAAASLLPAAYNFELPKTAHRIRSSGARRTALQLPEGLLLFSLPLSHLLAPFLEPDHVLILADPTYGACCLADRPAKALAADVLVHYGHSCLVPVTSSLLPVLYVFVEIRVDAQRLADAVRAAFPDPADAPRLAIAGTVQFISAVHAAREILSHDGYQVVVPQAKPLSAGEVLGCTAPALKRSEGVXXAVVFVADGRFHLEAFMIANPGVKAYRFDPFLGVLVLEEYDHVGMKQARKEAVLAARKAKSWGVILGTLGRQGSVKVLDRVVEHLEEKGLEHTVVLMSELSPARMELFGDSVDAWVQIACPRLSIDWGEGFKKPMLTTFEFDVALGYVPGWWEKGSRECGSGDATGCCSGSGTSTDCGCSNGGCADKDXXGGEYPMDYYSQDGGDWNSCYMKKKPSTGERNPLPSAVISVSVPRCKLLDXAPPCNPVMLVFP

SEQ ID NO: 802 - protein, 2220 aa, Oryza sativa
  misc_feature (2176)..(2176): Xaa can be any naturally occurring amino acid
  misc_feature (2186)..(2186): Xaa can be any naturally occurring amino acid
  misc_feature (2204)..(2204): Xaa can be any naturally occurring amino acid
  misc_feature (2220)..(2220): Xaa can be any naturally occurring amino acid
MPPPPPTASALQPTPPTRILLRRPAPVSAASWPSPTARRTPSAPSPFPAPAPPSPPTSLLPSPPPRLLAGGGRTSARSISVVLETLDPSHTGLRRSFAEVVRGAASHFSNSKQVVWARSSASSGLNSPFTSPVRNNHRSTRRVTSPRRAAPYDASLPQRRIAEQDDGHGLQDPGWIRRSGHRVRDCRRRGSAGRARSSARLRDVSRTLHSYYGARTRTPPPPLLRHHLADTRPPPLLRRRSGLPHTSARRERSPLSQRSCHARKFTNNFRTNLCIKSSSRNQPSAPFLDHNHPLIKQGMDSPATPVGLSPPLLSLVLRNEPCYTKAAVYGTDGRDLPYPKRTAKINLIYRGSRDMATMTSAVTSSPAATREHVLDGERRRDGANGGYQRTTAATAARHGWTDGGGGELRGDGVSGAPTVFGGGEAVDGNSDDLTMLMKETAIDGDDRSDDGDRLDTRRRRRRREQRGGGAREGDKLGRRWRRKEEFPKQERTRLPPPPPRSTQSKMSQLGDPATRPEEDTCFIPTSYAIDEELREWSETAAVSWAAHAPSTTTPRDVEQAFLDEFQLRRGEVAVSLYHPQAFLIKFQHRRHCEEALVKGYVKRRGIEIHFIKWRSLQSALGVALMFRVRLCLDGVPMHAWAADIAERIIGRTCALEQIETDVVHPVESGNTRSIDLWAWTANPSTIPKRMWLSFTNRAKDPKLAPLLAVESPPEHWQRGVRHPVLFHLEEIHDYTAATIDLEEQGSFQPTKRRLPPWSLGVLDGEQVPGRVFEDFPHHPPPPRSVHDRLGGTEREVDRHEDDRRDHHDDRRSGRGTRDGHTRRGRAARGGRPRDDDDRDDFDDDQDEDREERDRDDDRGRGDDRKDRDRGGRGRRRGSSNDHPRPWRRIDRDDDRDNRDCDLGHDCGEQRASDNDYRRERTRSLRRRDRGALAATAAVDGDRLTLSTTRASSSPRRTPLLCTAVRSKQRSPNCHRQWTSYNGSPSSRTRLWRGCRHSRSTLSRRTQGMKPGSACSLEADPGGERLRAHQVEPATADCGDHMPTSRLTATSCFADSASSRKPSQPHARSEGVFSGGGPGIAELNGHPRCLFASPPRAILASPPASPPRSPCVHPIQLTRRLKIQPRKCGQATRRNKRIAKQTSRPTMERCQRVLFKRLGILNDEGGTSIEQVLAQYIAMFNGLLPPHIIAALTAIFGIDDDEQDAMDAALISLVGEGVAEVADECVCEHLDASSLPASALASADFTAKFSAAHYVEHLRATVNLSNQSSRFLGLSSEPGQTRCGPRLLTVWAAAPTQDQAAHPLRGYKLDKFAFKPARGTRGGILLLWNSAVFDVQEVRVSRFSISAQVTVILTGATFLLTGVYGPTRHHLKSAFLRHIRRIRPGPEDGWLILGDFNMIYRARDKNNSNINLARMRRFRSTIDRCELHEIPLQNRKFTWSNERRRATLVKLDRYFCNETWDLAFPNHVLHALPTGPSDHCPLVLSDPQCPRRPRAFKFENFWTRIPGFKDKVKDAWCQPSSHTEPMHRLNEKLHRTATCLREWAKGIYTEAKLQFHMALDVIKRLDVAQEHRDLSAQETRLRAALKRKILGLASIERARKKQASRVTHICEGDANTKFFHLKMNARRRKNTIHRLKKDNGCAVTHKEKEATIHDHFASIMGRPAPRPNKLNWDALDISPIDLATLGEPFSEQEVHQAIKKMPSDKAPGPDGFTGIFFKVCWEIIKEDVFLVFNSIYNLRCAHLNLINSANIVLIPKKEGAEGVSDFRPISLIHSIAKIFSKMLALRLRPHMHSLISINQSAFIKGRSIHDNFLFVRNMTRRYHRLRRAMLLFKLDITKAFDSVRWDYLLALLQRRGFPTKWIDWLGALLSTSTSQVLLNGLPGQRIKHGRGLRQGNPLSPLLFILAIDPLQRILFKATELGAISKIRGRTTRLRISMYADDAIIFINPTRGDVTAFTDILQHFGTATGLVTNFQKSQVAAIRCGGIELNEVLDGVPVVRASFPIKYLGLPLALGRLRKVDLQPVFNKISGRVASWRGKNMAAAGRTTLVKSVLTAQPIYLLTALKITKESLEQLDKQRRHFLWAGTGDITRGKCKVNWTKTCMPTSQGGLGVLNLDKFTRALRLRWLWHEWKDQTKPWVGLETPCDEIDRNLFAASTNITIGDRNTVRFWESAWIVXAGRRVQSSIXLIWKVSHPNLIPPYNGTXQERVVGKPAIDENPVX

SEQ ID NO: 803 - protein, 314 aa, Oryza sativa
EDAMSTGDSTESLDIDCLDDGDSEVVSSLQHLADDKLHISDNRDVAGVASKWTKHGCNSVEIDYIVDIDNNHEDPQLCATLAFDIYKHLRVAETKKRPSTDFVETIQKNIDTSMRAVLIDWLVEVTEEYRLVPETLYLTVNYIDRYLSSKVINRRKMQLLGVACLLIASKYEEICPPQVEELCYISDNTYTKDEAPVLHLEFLANYIAELSLLEYSLICYVPSLIAASSIFLAKFILKPTENPWNSTLSFYTQYKPSDLCNCAKGLHRLFLVGPGGNLRAVREKYSQHKAQLPRAKKHTDLLPLSNLKSGDCGI

SEQ ID NO: 804 - protein, 394 aa, Oryza sativa
  misc_feature (14)..(14): Xaa can be any naturally occurring amino acid
  misc_feature (308)..(308): Xaa can be any naturally occurring amino acid
  misc_feature (348)..(348): Xaa can be any naturally occurring amino acid
EGEVSKNIEIRAEXSSTSRLPTIVPWHHDCSPGLSDNSMSKEDAMSTGDSTESLDIDCLDDGDSEVVSSLQHLADDKLHISDNRDVAGVASKWTKHGCNSVEIDYIVDIDNNHEDPQLCATLAFDIYKHLRVAETKKRPSTDFVETIQKNIDTSMRAVLIDWLVEVTEEYRLVPETLYLTVNYIDRYLSSKVINRRKMQLLGVACLLIASKYEEICPPQVEELCYISDNTYTKDEVLKMEASVLKYLKFEMTAPTTKCFLRRFLRAAQVCHEAPVLHLEFLANYIAELSLLEYSLICYVPSLIAASSXFLAKFILKPTENPWNSTLSFYTQYKPSDLCNCAKGLHRLXLVGPGGNLRAVREKYSQHKYKFVAKKYSPPSIPAEFFEDPSSYKPD

SEQ ID NO: 805 - protein, 653 aa, Oryza sativa
GKASNNHNFFHNLQLFRSVYSSKPAAADVIGIDLGTTNSCVSVMEGKTPRVIENAEGARTTPSIVAKNQNGDLLVGITASRQAVTNAQNTVRGSKRLIGRTFDDPQTQKEMKMVPYKIVRGPNGDAWVEMGGQQYSPSQIGAFVLTKMKETAEAFLGKTVSKAVITVPAYFNDAQRQATKDAGRIAGLEVMRIINEPTAAALSYGMNNKEGLIAVFDLGGGTFDVSILEISNGVFEVKATNGDTFLGGEDFDGALLDYLVSEFKKSDNIDLSKDKLALQRLREAAEKAKVELSSTMQTEINLPFITADATGAKHFNITLTRSKFESLVQSLIERTRIPCVNCLKDAGVSAKDIDEVLLVGGMTRVPKVQDIVSQIFNKTPSKGVNPDEAVAMGAAIQGGILRGDVKELLLLDVTPLSLGIETLGGIFTRLINRNTTIPTKKSQVFSTAADNQTQVGIKVLQGEREMATDNKLLGEFQLEGIPPAPRGMPQIEVTFDIDANGIVKVSAKDKSTGKEQEITIKSSGGLSESDIEKMVREAELHSQKDQERKSLIDLKNSADTTIYSIEKSVSEYKDKVPAEVTNEIQSAVSDLRAAMAEDDLEKIKQKLEAANKAVSKIGEHMQQGGGGGSGGGSSSSSGGDQTPEAEYQDAAKE

SEQ ID NO: 806 - protein, 541 aa, Oryza sativa
  misc_feature (532)..(532): Xaa can be any naturally occurring amino acid
  misc_feature (540)..(541): Xaa can be any naturally occurring amino acid
MTCRYVYACFKIHADIFRQVVLGYVLFFFSHLGRFGKNGITTSSTINKNMDGGGCCSCRGSCTLAFNRGANLALAGTETVDPTVSSAIQFRSGASMLHQDVHYKLVTSRAPVVASRLRAWPPQIERESRLPLRFSSPPRDLTAGDDPLPPPAAAAAPPPPPATTTMSYDRVTTFEDSEKESEYGYVRKVSGPVVVADGMGGAAMYELVRVGNDNLIGEIIRLEGDSATIQVYEETAGLMVNDPVLRTRKPLSVELGPGILGNIFDGIQRPLKTIAIKSGDVYIPRGVSVPALDKDQLWDFEPKKLGVGDAITGGDLYATVFENTLMKHHVALPPGSMGKISYIAPAGQYSLQDTVLELEFQGIKKQFTMLQTWPVRSPRPVSSKLAADTPLLTGQRVLDALFPSVLGGTCAIPGAFGCGKTVISQALSKYSNSEAVVYVGCGERGNEMAEVLMDFPQLTMTLPDGREESVMKRTTLVANTSNMPVAAREASIYTGITIAEYFRDMGYNVSMMADSTSRWAEALREISGRLVXCFLSRCYXX

SEQ ID NO: 807 - protein, 426 aa, Oryza sativa
MFADFSAAAMELGEVLGLQGLTVPSTKEGDLSLIKRAAAGSFTQAAAASYPSPFLDEQKMLRFAKAAHTLPSGLDFGRENEQRFLLSRTKRPFTPSQWMELEHQALIYKYLNAKAPIPSSLLISISKSFRSSANRMSWRPLYQGFPNADSDPEPGRCRRTDGKKWRCSKEAMADHKYCERHINRNRHRSRKPVENQSRKTVKETPCAGSLPSSVGQGSFKKAKVNEMKPRSISYWTDSLNRTMANKEKGNKAAEENNGPLLNLTNQQPTLSLFSQLKQQNQPEKFNTAGDSESISSNTMLKPWESSNQQNNKSIPFTKMHDRGCLQSVLQNFSLPKDEKMEFQKSKDSNVMTVPSTFYSSPEDPRVSCHAPNMAQMQEDSISSSWEMPQGGPLGEILTNSKNPDDSIMKPEARPYGWLLNLEDHAM

SEQ ID NO: 808 - protein, 779 aa, Oryza sativa
  misc_feature (12)..(13): Xaa can be any naturally occurring amino acid
  misc_feature (373)..(374): Xaa can be any naturally occurring amino acid
  misc_feature (391)..(392): Xaa can be any naturally occurring amino acid
  misc_feature (779)..(779): Xaa can be any naturally occurring amino acid
MADNGNAKPGGXXGSGAYTINLDNFSKRLKVFYDHWKEHNSDLWGSSNAIAIATPPPSEDLRYLKSSALDVWLLGYEFPETIIVFMHKQIHFLCSQKKANLIGTLKKASNDAVGADIVLHVKAKNDSGVGLMEDIVRAVCAQSKSDDPIVGHIAKEAPEEKVIDEERKVTHSSLMDETEKAILDPLKVKVKLKAENVDICYPPVFQSGGKFDLKPGASSNDDYLYYDSASVIICAIGARYGNYCSNMARTFLIDATPAQSKAYETLMKAHEAALEALKPGNRMSAVYQAAVDVIEKNAPELLPNLTKSAGTGIGLEFRESGLNLNPKNDRIIKAGMVFNVSLGLLNLQAETKSEKTKQYSLLLADTCLVPLEXXLTASCSKLLKDVAYSFXXDEDEVLPVKKVEVNAKEALPPTKATLRSDNQEMSKEELRRQHQAELARQKNEETARRLAGVGSGSGDGRGPSRSSNELVAYKNVNDVPYARELVIQVDQKNEAVLLPIHGSMVPFHVSTVKSVTSHQDNRTCTIRIFFNVPGMPFSNDSNLKSQGAIYLKEITFRSKDPRHSSEVVPQIKTLRRQVASRESERAERATLVTQEKLQLASNRNKPVRLSDVWIRPAFGGRGRKLTGTLESHVNGFRYSTSRADERVDIMYGNVKHAFFQPAEKEIITLLHFHLHNHIMVGNKKTKDVQFYVEVMDVVQTLGGNRRSALDPDEIEEEQRERDRKNRINMDFQNFVNKVNDHWSQPQFKGLDLEFDVPLRELGFHARPRLQGPMVSSVGX

SEQ ID NO: 809 - protein, 1060 aa, Oryza sativa
  misc_feature (12)..(13): Xaa can be any naturally occurring amino acid
  misc_feature (432)..(433): Xaa can be any naturally occurring amino acid
  misc_feature (450)..(451): Xaa can be any naturally occurring amino acid
  misc_feature (1041)..(1041): Xaa can be any naturally occurring amino acid
  misc_feature (1046)..(1046): Xaa can be any naturally occurring amino acid
MADNGNAKPGGXXGSGAYTINLDNFSKRLKVFYDHWKEHNSDLWGSSNAIAIATPPPSEDLRYLKSSALDVWLLGYEFPETIIVFMHKQIHFLCSQKKANLIGTLKKASNDAVGADIVLHVKAKNDSGVGLMEDIVRAVCAQSKSDDPIVGHIAKEAPEGKLLEAWADKLSSSSVQLTDITNGFSELFAMKDTSEITCVKKASYLTSSVMKNFVVPKLEKVIDEERKVTHSSLMDETEKAILDPLKVKVKLKAENVDICYPPVFQSGGKFDLKPGASSNDDYLYYDSASVIICAIGARYGNYCSNMARTFLIDATPTQIKAYETLMKAHEAALEALKPGNRMSAVYQAAVDVIEKNAPELLRNLTKSAGTASGLEFRESGLNLNPKNDRIIKAGMVFNVSLGLHNLQAEKKSEKTKQYSLLLADTCLVPLEXXLTASCSKLVKDVAYSFXXDEDEVLPVKKVEVNAKEALPPTKATLRSDNQEMSKEELRRQHQAELARQKNEETARRLAGVGSGSGDGRGPSRSSNELVAYKNVNDVPYARELVIQVDQKNEAVLLPIYGSMVPFHVSTVKSVTSHQDNRTCTIRIFFNVPGMPFSNDSNLKSQGAIYLKEITFRSKDPRHSSEVVQQIKTLRRQVASRESERAERATLVTQEKLQLTSNRNKPVRLSDVWIRPAFGGRGRKLTGTLESHVNGFRYSTSRADERVDIMYGNVKHAFFQPAEKEMITLLHFHLHNHIMVGNKKTKDVQFYVEVMDVVQTLGGNRRSALDPDEIEEEQRERDRKNRINMDFQNFVNKVNDHWSQPQFKGLDLEFDVPLRELGFHGVPYKASAFIIPTSTCLVELIETPFLVVTLSEIEIVNLERVGFGTKNFDMAIVFKDFKKDVLRIDSIPSTSLDAIKEWLDTTDLKYYESRLNLNWRPILKTIIDDPQKFIDDGGWEFLNMEASDSETEETEESDQGYEPSDAEPESESEDEDSDSESLVESDEDDEDDSEEDSEEEKGKTWEELEREASNADRENGAESDSEEERRRRKVKTFSKSRXTTGAXSSFKGGPSKKPKFR

SEQ ID NO: 810 - protein, 123 aa, Oryza sativa
  misc_feature (1)..(1): Xaa can be any naturally occurring amino acid
  misc_feature (25)..(25): Xaa can be any naturally occurring amino acid
  misc_feature (50)..(50): Xaa can be any naturally occurring amino acid
  misc_feature (91)..(91): Xaa can be any naturally occurring amino acid
XHDTFSADDIMGEPEIDLQPMITAXVMAFGDPSRVGDMQIGRWFMTQDMXLVKDSTVNVVSGKVKQEVHLKLQNVESGEMELELEWVPIPXINKARLVLCPKKLLKKRQFCNLNEWLQIPCTY

SEQ ID NO: 811 - protein, 288 aa, Oryza sativa
  misc_feature (166)..(167): Xaa can be any naturally occurring amino acid
  misc_feature (191)..(192): Xaa can be any naturally occurring amino acid
  misc_feature (288)..(288): Xaa can be any naturally occurring amino acid
MWRLKVAQGGGALLRSTNGFAGRAVWEFDPDHGTPEDRANVERVRRDFTDHRLRRPESADLLMRMQFARENNHQRRAPAVNKLGEKEQVTEETVMASLRRALDEFSSLQADDGHWPGDLSGAIFIMPVLNEDGGWGMLILGSSTMFATCLNYVTLRLIGEEPSNEXXLARGHAWIISHGGATLVPQWGKIXXKFWGPTRVVYVPMAYLYGKKFVGPITPTILALREEIYTDPYHTIDWAQACNACSKEDLVCPRTLLQNVVWTSLYKWVEPVLGSRPMNKLRERALDX

SEQ ID NO: 812 - protein, 372 aa, Oryza sativa
  misc_feature (70)..(71): Xaa can be any naturally occurring amino acid
  misc_feature (196)..(197): Xaa can be any naturally occurring amino acid
  misc_feature (372)..(372): Xaa can be any naturally occurring amino acid
MWRLKVAQGGGALLRSTNGFAGRAVWEFDPDHGTPEDRANVERVRRDFTDHRLRRPESADLLMRMQVCVXXCSSGLIIIVALEKDTEQVTEETVMASLRRALDEFSSLQADDGHWPGDLSGAIFIMPVLIFSLYATGSLDTVISSEHRREICRYIYNHQNEDGGWGMLILGSSTMFATCLNYVTLRLIGEEPSNEXXLARGHAWIISHGGATLVPQWGKICLSIIGVYEWSGNNPIFPELWLAPQFLPFHPGKFWGPTRVVYVPMAYLYGKKFVGPITPTILALREEIYTDPYHTIDWAQACNACSKEDLVCPRTLLQNVVWTSLYKWVEPVLGSRPMNKLRERALDRLMEHIHYEDENSQYLCLCPVNKVX

SEQ ID NO: 813 - protein, 320 aa, Oryza sativa
  misc_feature (196)..(197): Xaa can be any naturally occurring amino acid
  misc_feature (223)..(223): Xaa can be any naturally occurring amino acid
  misc_feature (320)..(320): Xaa can be any naturally occurring amino acid
MWRLKVAQGGGALLRSTNGFAGRAVWEFDPDHGTPEDRANVERVRRDFTDHRLRRPESADLLMRMQFARENNHQRRAPAVNKLGEKEQVTEETVMASLRRALDEFSSLQADDGHWPGDLSGAIFIMPVLIFSLYATGSLDTVISSEHRREICRYIYNHQNEDGGWGMLILGSSTMFATCLNYVTLRLIGEEPSNEXXLARGHAWIISHGGATLVPQWGKICLXGKFWGPTRVVYVPMAYLYGKKFVGPITPTILALREEIYTDPYHTIDWAQACNACSKEDLVCPRTLLQNVVWTSLYKWVEPVLGSRPMNKLRERALDX

SEQ ID NO: 814 - protein, 373 aa, Oryza sativa
MQKSSITPIRCNEDELKVISNMLPCEVKDFPCSYLGLPLNIKVADYLPMWKASLMNKAGRLILKTDSDRAWQGLPIQVPRMSHNLFSVAVESRVGNGQSTLFWTDRWLLGRNILKMAPNLCMLVAKRVVKRCTVAHALNNGKWITDIKGPLTVQVINEYLQIWDSVFGIGLQEGVPDQHVWKLTDSGSYTSKSAYRAFFVGTVRFAPWKRIWNSWAPLKCKFFVWLAIYNRCWTADRLAKRGLPHRDACPLYDQADETIQHILVSCVFSRQVWSLVLQRLGFSSTLPNQDSKFSSWWSRTVKGLQKNEKKGLNSLVILAIWEIWKHINDCVFNRATHSVPVAIQAIANEGALWCFVGASKLQELFAKAIAPVP

SEQ ID NO: 815 - protein, 842 aa, Oryza sativa
MTKLLHSACLLICISGAIGLAAAAAGHPGCQTRCGDVDIPFPFGIGDHCAIHEGFRLECDNATKGTSNQKPFWGDFEVIKISMEDGKVWVKAYMSRQCYDQSTGACDNKVNKLTPKNGSCSGAGCCQANVPKSIQYYQGYFNEGYNTTKIWMSSPCSYMAVMETAAFNFSTSYLTSSVFYDTYKGGVPVVYDWAITSKTCTESRRNKTSYACISNNSQCIDNLTNAQGYRCKCSNGYEGNPYIKDGCKDIDECLNNATYPCKGICTNTLGNFTCSCSPGSYMMNGDCMPKKKLRFDSVPVEATNRFNEQQILGQGGHGTVYKGLLKGNMEVAVKRCMTINEHQKKEFGKEMLILSQINHKNIVKLLGCCLEVEVPMLVYEFIPNGTLFDLIHGNHGQQISLATRLQIAHESAEALTYLHSCASPPILHGDIKSSNILLDRNLIAKVSDFGASILAPTDESQFVTLVQGTCGYLDPEYMQLCLLTDKSDVYSFGVVLVELLTCQKAFNLNAPEHEKSLSMRFLNAMKNNKLADILDDQIKNSENMPFLEEIAELAAQCLEMSGVNRPSMKHIADNLDRLRKVMQHPWAEQNSEELESLLGESSMVSSRLSVATFQFQLFQGFSPVLQAGFSVVKGYHEGFPCTHHRFLRLLRHRRALGFVLQDVLAPLLEVAALRSGPFIWPAPDTVAFLTPGDGADRGGGGAKGGGERFMGFRSDGDRKAMRAAGREAEVVDGGTVLLTPGDDVDFKLHTCCHHRSLVHTGMTLVVHRAGTVVCALDLNIVVSEMTQQQPLRAQHVWDVGKRKGPAATLHRNRCSSSVPHYHLVKLRSSSIAGLSTSGAPRG

SEQ ID NO: 816 - protein, 124 aa, Oryza sativa
  misc_feature (1)..(1): Xaa can be any naturally occurring amino acid
  misc_feature (20)..(20): Xaa can be any naturally occurring amino acid
XIRHEPMKNRVIWEYLHNYXTGRSAVVVGAIALFTGLQHLGDRYGSKNIKGLTCGLILWVVGVTLVVVYLEFMAARRRRGGGADEGKWVLGNTDEDDSVDLLQSTKMESDSIEPMEVQLEPLKG

SEQ ID NO: 817 - protein, 427 aa, Oryza sativa
  misc_feature (427)..(427): Xaa can be any naturally occurring amino acid
GGPCGISGGGGMYVPQPSRSDAGDAGDQPRVYQVWRGSNEFFLRGRFIFGPDVRSIFLTMFLIVAPVVAFCVFVARHLIDDFPGDWGISVMVVVVVFTVYDLTLLLLTSGRDPGIIPRNTHPPEPEGFDGSNDSGVQTPQQLRLPRTKDVIVNGISVRIKYCDTCMLYRPPRCSHCSICNNCVERFDHHCPWVGQCIGLRNYRFFYMFVFSTTLLCLYVFAFCWVYIIKIRNAESLSVWKAMLKTPASIVLIIYCFLCVWFVGGLSVFHCYLMSTNQTTYENFRYRYDRRANPYNRGVLNNFLEIFCSRIPPSKNNFRARVTVEQGLQPRVASRGFMSPNMGKPVGDLEMGRKPVPWDEPRTAADIRDLEAGLGGFLDEKEGRLTHASPDLSSPADLMKGRAGTHSRRSSWVNRSGNWERIPPLVCX

SEQ ID NO: 818 - protein, 185 aa, Oryza sativa
MAIATESRCEEEKASPHSQEREKRYIASLAHALIYLHGKHVIHRDIKPENLLIGSQGELKIADFGWSVHTFNRRRTMCGTLDYLPPEMVEKTEHDYHVDIWSLGILCYEFLYGVPPFEAKEHSETYRRIVKVDLKFPLKPFVSPAAKDLISQMLVKNSAHRLPLHKLLEHPWIVQNADPSGVYRG

SEQ ID NO: 819 - protein, 418 aa, Oryza sativa
  misc_feature (144)..(144): Xaa can be any naturally occurring amino acid
MLISEYNWNATYKFDMFSTHEHEALQKREPIKAHLLSQPTRYVILVAHAMSAISRPSIILGAHTVTTNGSSARTHEAERNSTVERSTHVLKAASSPKSPKSPIRISPPRRRCGRSSPPLSLLFPHGDRHRVALRGGEVMWLGFXQEVKRWVLSDFDIGKPLGRGKFGHVYLAREKRSNHIVALKVLFKSQLKQSQVEHQLRREVEIQSHLRHPNILRLYGYFYDQTRVYLILEYALKGELYKELQRCKHFSERRSATYIASLAHALIYLHGKHVIHRDIKPENLLIGSQGELKIADFGWSVHTFNRRRTMCGTLDYLPPEMVEKTEHDYHVDIWSLGILCYEFLYGVPPFEAKEHSETYRRIVKVDLKFPLKPFVSPAAKDLISQMLVKNSAHRLPLHKLLEHPWIVQNADPSGVYRG

SEQ ID NO: 820 - protein, 473 aa, Oryza sativa
  misc_feature (305)..(306): Xaa can be any naturally occurring amino acid
MEASKLYYRVLEAICRAESQNNNVNNLTPLLSNERFHRCLIACSAELVLATHKTVIMMFPAVLESTGLTAFDLSKIIENFVRHEETLPRELKRHLNSLEEQLLESMSWEKGSSLYNSLVVARPSLSTEINSLGLLAEPMPSLDGIVARQSIHPDGLPPTPSKRSSAGPDGNCYPQSPKRLCTESRNSLVERNSQTPPPKQSQTGLSILKAKYHPLQATFASPTVSNPVSGNEKCAVVGVQIFFSKILKLAAIRIRNLCERLRHEELTVSVYNIFKQILDQQTALFFNRHVDQIILCCLYGVAKGXXGSRHVDIIVFYNQVFVPTVKPLLVALMPSSTRPEDKRNTNSQIPGSPKSSPFSNLPDMSPKKVSSSHNVYVSPLRQTKMDALLSPSSRSFYACIGESTQAFQSPSKDLAAINSRLNYPTRRINTRINFDMVSDSVVAGSLGQPNGGSASSDPAAAFSPLSKKSKTDS

SEQ ID NO: 821 - protein, 926 aa, Oryza sativa
  misc_feature (391)..(392): Xaa can be any naturally occurring amino acid
DAEKLCFAFVLYCVSKLKETKAGSSGVRLWEILKGCKLKYDDFFKESQRLASRIDQVLGSRYGSDWEARLEVGSRQANLPTISQYPRFYCKAFNELFLSPSTDQEPGSTTNIPDYIRFGWLLFLILRSKSPELFKDLVSCIHGLVAILAILLIHVPAKFRSFTIEGSSHLIKQTEKGVDLLPSLCHNYHTSEDRLKEMMGKSYKVIEVFFSRKAINASEFKTVNLDKIDTDGLMYFKDLVDDEIFQSNLEKLEKLSSTTGCQGELDLEMFLTSNDYVLNAENSSGSSANFGCSKRVFETLASPTKTIKNMLAAPSSPSSPANGGSIKIVQMTPVTSAMTTAKWLRDVISSLPDKRSSKLEEFLSSCDMDLTSDVVKRVSIILEAIFPTKSXXDRGTSIGLNCANAFDIPWAEARKMEASKLYYRVLEAICRAESQNNNVNHLTPLLSNERFHRCLIACSAELVLATHKTVIMMFPAVLESTGLTAFDLSKIIENFVRHEETLPRELKRHLNSLEEQLLESMSWEKGSSLYNSLVVARPSLSTEINSLGLLAEPMPSLDGIVARQSIHPDGLPPTPSKRRPSAGPDGNCYPQSPKRLCTESRNSLVEHNSQTPPPKQSQTGLSILKAKYHPLQATFASPTVSNPVSGNEKCAVVGVQIFFSKILKLAAIRIRNLCERLRHEELTVSVYNIFKQILDQQTALFFNRHVDQIILCCLYGVAKVSQLSLTFKEIVNNYKREPQCKPEVFRSIFVGSTNRNGGCGSRLVDIIVFYNQVFVPTVKPLLVALMPSSTRPEDKRNTNSQIPGSTKSSPFSNLPDMSPKKVSSSHNVYVSPLRQTKMDALLSPSSRSFYACIGESTQAFQSPSKDLAAINSRLNYPTRRINTRINFDMVSDSVVAGSLGQPNGGSASSDPAAAFSPLSKKSKTDS

SEQ ID NO: 822 - protein, 534 aa, Oryza sativa
MPPPRASAILSAACRSSRTLFVIRRLGFLGSCTPTVRQNASVELPGAGLYPRFHQSILPIHCVVGSLRLCHSTALDGSKDVHVSEIVKILKSRDGDSELAEVLNQFADEMDEDVVLKVLQKQRSNWKVALSFFKWAAGLPQYNHGSRAYTEMLDILGRMKKVRLMRQLFDEIPVESRQSVVTNRMFAVLLNRYAGAHKVQEAIDMFYKRKDYGFELDLVGFQILLMSLCRYKHVEEAEALFLQKKDEFPPVIKSWNIILNGWCVKGSLADAKRVWNEIIASKLKPDLFTYGTFINSLTKSGKLSTAVKLFTSMWEKGINPDVAICNCIIDQLCFKKRIPEALEIFGEMNDRGCQADVATYNTLIKHFCKINRMEKVYELLDDMEVKGVSPNNMTYSYILKTTEKPKDVISLMQRMEKSGCRLDSDTYNLILNLYVSWDYEKGVQLVWDEMERNGSGPDQRSFTIMVHGLHSHDKLDEALHYYRTMESRGMTPEPRTKLLVKAIRMKKDEPATEEPLTRKNLKLDPISRLFHVRK

SEQ ID NO: 823 - protein, 188 aa, Oryza sativa
MSLSTIARRLCCSRPTSGGRLSAVWAHLYSTEAAKDTGAKKYKYPEVYDPYGPMSPPSQKVVDLADRIAALPPEEIKQIAPALLLRLNQPPPQAISGQGLGGGGAAGAAKAEEKKAEKTVFDVKLEKFDAAAKIKIIKEIRTFTDLGLKEAKELVEKAPVILKQSLTKEEAEAIIEKIKVAGGVAVME

SEQ ID NO: 824 - protein, 664 aa, Oryza sativa
LTVERESRLPLRFSSPPRDLTAGDDPLRPPGARRAPPPSPATTTVWYDRVTTFEDSEKESEYGYVRKVSGPVVVADGMGGAAMYELVRVGNDNLIGEIIRLEGDSATIQVYEETAGLMVNDPVLRTRKPLSVELGPGILGNIFDGIQRPLKTIAIKSGDVYIPRGVSVPALDKDQLWDFEPKKLGVGDTITGGDLYAIVNENTLMQHHVALPPGSMGKMSYIAPAGQYSLQDTVLELEFQGIKKQFTMLQTWPVRSPRPVSSKLAADTPLLTGQRVLDALFPSVLGGTCAIPGAFGCGKTVISQALSKYSNSEAVVYVGCGERGNEMAEVLMDFPQLTMTLPDGREESVMKRTTLVANTSNMPVAAREASIYTGITIAEYFRDMGYNVSMMADSTSRWAEALREISGRLAEMPADSGYPAYLAARLASFYERAGKVKCLGSPDRTGSVTIVGAVSPPGGDFSDPVTSATLSIVQVFWGLDKKLAQRKHFPSVNWLISYSKYSKALESFYEKFDQDFIDIRTKAREVLQREDDLNEIVQLVGKDALAESDKITLETAKLLREDYLAQNAFTPYDKFCPFYKSVWMMRNIIHFNTLANQAVERAANADGQKITYSVIKHRMGDLFYRLVSQKFEDPAEGEDVLVAKFQKLYDDLTTGFRNLEDEAR

SEQ ID NO: 825 - protein, 140 aa, Oryza sativa
MSSLISHMDGTCWNPAHQHLLLQLHHNCHILQHHHRHPERHHRHHHHKHLRHRHPLHRHHHHMPHKHHRHLHTRSHHNHHHILIQIQHYLHSHTLLCHNHMQYYHNNLLQLIGNQHHTHSHHCCHCRHQHLRRTRGRTRG

SEQ ID NO: 826 - protein, 481 aa, Oryza sativa
  misc_feature (30)..(30): Xaa can be any naturally occurring amino acid
  misc_feature (481)..(481): Xaa can be any naturally occurring amino acid
KYRGEKAHQDCFFRFLGLLLRQHEEALLLXLFLLILAASVVHGEDGAYIGVNIGTAMTSVPAPTQITTLLRSQNIRHVRLYDADPAMLAALANTGIRVIVSVPNEQLLAIGNSNATAANWVARNVAAHYPSVNITAIAVGSEVLSTLPNAAPLLMPAIRYLQNALVAAALDRYIKISTPHSSSIILDSFPPSQAFFNRSLDPVLVPLLKFLQSTGSPLMLNVYPYYDYMRSNGVIPLDYALFRPLPPNKEAVDANTLLHYTNVFDAVVDAAYFAMAYLNVTNVPVMVTETGWPHKGDPSNEPDATSDNADTYNSNLIRHVMNTTGTPKHPGVAVPTYIYELYDEDTRPGSTSEKYWGLFDMNGIPAYTLHLTGSGVLLANDTTNQTYCVAREGADEKMLQAALDWACGPGKVDCSALMQGQPCYESARTPTPTTMAWATWMELFRETSGSTHWRYQTRIPPREPTRTGTSLTISSSSNSPX

SEQ ID NO: 827 - protein, 397 aa, Oryza sativa
  misc_feature (1)..(1): Xaa can be any naturally occurring amino acid
  misc_feature (101)..(102): Xaa can be any naturally occurring amino acid
  misc_feature (174)..(174): Xaa can be any naturally occurring amino acid
  misc_feature (186)..(186): Xaa can be any naturally occurring amino acid
  misc_feature (390)..(390): Xaa can be any naturally occurring amino acid
XLRDATTVSECLHTFCRKCIYEKLNDEEVESCPVCKIDLGCTPVEKLRADHNLQDVRSKIFPFKRKKISADEVAAPVLLPSKRKERSISSLVVDTPTVTPXXGLTGRRTRAVTRKAVRGLGPGIDDPVKKEIDNGEKHAQNSSLPTNWGREAETRRQMSSNAEASNHSSNKDTXKVIARTWPIRLXELWRPLNCLVEAANRTKSSRSSSQSPIVKREQLRDSPGSTSVNKTKSREYMQKSKIEDDKKDVPLLKRKNQRTGRRRELHAQSDSKPEAAATQNEKKFSSIWFSLVASFEQEGDPPLPQIPSHYLRIKDGNIPASSIQKYLMQKLGLPNEAEVEINCCGQPVNPTQPLCNLVEVWLRGRSTQTTQTMIGSPAKEFVMVLTYGRXQRPSRHE

SEQ ID NO: 828 - protein, 1098 aa, Oryza sativa
  misc_feature (1071)..(1071): Xaa can be any naturally occurring amino acid
MAKAARRGVNPPSSASPSLTNPAIAARGGADPLSLACPSLTDPATAAGGGADRWSPTFPSLMHLAVGVAAVARLPLPHGSGGGGGMGRPPPSHESDDENDGGKLPGGGSKDPDLGSGMSAASNVGCATAPVSSSREKGRREELGGGGGGLVGRRSEHVDGGCSAKKAKKPPVMPPPAAFLFLACVLGASVAVAAAVAADGDGDAMRELRRALAPPDWGAAGEDGKGSYYCAWRGVTCAGGGGGAVVAIDLPRRGLRGDFSAVAGLRALARLDLSFNALRGGVPGEALGGLPGLEFLDLSMNHLSGGVPPSLAGAVGLRFLNLSNNALSGGIPDELRSLRALTELQISGNNLTGAIPPWLAALPALRILSAYENSLSGPIPSGLGLSSKLQVLNLHSNALEGAIPSSLFDLGNLQVLILTVNRLNGTIPDTIGRCSALSNVRIGNNRLAGAIPASIGDATSLTYFEADSNELTGGIPAQLARCANLTLLNLAYNRLAGEVPDVLGELRSLQELIVSSNGLSGEFPRSILRCRNLSKLDLSYNAFRGGLPESVCNGSRLQFLLLDHNEFSGGIPVGIGGCGRLLELQLGNNNLTGEIPAEIGRVKSLQIALNLSFNHLVGPLPRELGRLDKLVALDLSSNEISGEIPGDMRGMLSLIEVNLSNNRLSGAIPVFAPFQKSAASSFSGNTKLCGNPLVVDCGPIYGSSYGMDHRKISYRVALAVVGSCVLIFSVVSLVVALFMWRERQEKEAEAKMAEAGEVVVAAPQVMASNMFIDSLQQAIDFQSCVKATFKDANVVSNGTFSITYKAVMPSGMVVCVKKLKSVDRAVIHHQTKMIWELECLSHINHPNLVRPIGYVIYEDVALLLHHHMPNGTLLQLLHNVDNRDNQKPDWPRLLSIAIDVAEGLAFLHHVATIHLDISSGNVFLDSHYNALLGEVEISKLLDPLKGTASISAVAGSFGYIPPEYAYTMQVTVPGNVYSFGVVLLEILTSKLPVDEEFGEGMDLVKWVHSAPARGETPEQIMDPKLSTVSFAWRKQMLAVLKVAMLCTERAPAKRPKMKKVVEMLQEAKNSXGPRAGTAYPLAVKIAHETRSVNNNPVR

SEQ ID NO: 829 - protein, 344 aa, Oryza sativa
MRSCTSLTKNINSDRTNSLDWSTFSISCQSVSMMIGSSVHWRAIILGLRAQPPLTFFWSQTTIHFRALITFLRGTATLDLIWAPAPAAIDSPAPPARLAQKEPSSLPLSTRMPLSARRQESQRLPAPTLPHWPTGWRAAACALPEGHYSKPAHTPPSARRPLPPRVFWIDLICVVGVLLAEKSRHRHRRSEGRRRRPPPPPPSSSPPAAMAFGDRITTFEDSEKESEYGYVRKVSGPVVVADGMGGAAMYELVRVGHDNLIGEIIGLEGDSATIQVYEETAGLMVNDPVLRTRKRPLKTIAIKSGDVYIPRGVSVPALDKDALWHFKPEKLGVGDIITGGDLYA

SEQ ID NO: 830 - protein, 650 aa, Oryza sativa
  misc_feature (458)..(458): Xaa can be any naturally occurring amino acid
TSSRHRHRRSEGRRRRPPPPPPSSSPPAAMAFGDRITTFEDSEKESEYGYVRKVSGPVVVADGMGGAAMYELVRVGHDNLFGEIIRLEGDSATIQVYEETAGLMVNDPVLRTRKPLSVELGPGILGNIFDGIQRPLKTIAIKSGDVYIPPGVSVPALDKDALWHFKPEKLGVGDIITGGDLYAIVNENTLMQHKVALPPGAMGKISYIAPAGQYSLQDTVLELEFQGIKKEFTMLQTWPVRSPRPVMEKLAADTPLLTGQRVLDALFPSVLGGTCAIPGALGCGKTVISQALSKYSNSQAVVYVGCGERGHEMAEGLMDFPQLTMTTEDGREESVMKRTTLVANTSNMPVAAREASIYTGITIAEYYRDMGYNVSMMADSTSRWAEALREISGRLAEMPADSGYPAYLAARLASFYERAGKVRCLGSPKRDGSVTIVGAVSPPGGDFSDPVTSATLSXVQVFWGLDKKLAQRKHFPSVNWLISYSKYSKALEPHYEREDPDFIDIRTKAREVLQREDDLNEIVQLVGKDALAESDKITLETAKLLREDYLAQNAFTPYDKYCPFYKSVWMMRNIIHFNTLATQAVERAAGADGQKITYSVIKHRMGDLFYRLVSQKFEDPAEGKEVLIAKFQKLYDDLTAGFRNLEDEAR

SEQ ID NO: 831 - protein, 408 aa, Oryza sativa
  misc_feature (103)..(104): Xaa can be any naturally occurring amino acid
MGEEEKIMAAGKKMVRVREFIMEKDLPAVEELERLCQAGLSGGMSLYAEQIGDPFARVRHAPDHVILVAECGDEVVGVIKACVRMVTRGSSSSLRKTKTKTNXXFVKAACLLGLRVSPSHRRLGIATELVRRAEEWCAARGAAYATMATTASNAASLALFQGRFKYALFRKPRFLGHPVHRHRARVPRAHRVLQLPPPLAAAAYAALLPAAAAAPEFVPADLPALLAHKLTRGTYLAVERSPGAGAPSSFAVLSVYDATRSLSFRVGGAPPLLRASLAAARALDRRAPWLRVPSVPDVFRPFGAYLLYGLHMSGPAGAALLRTLCRHAHNVARNNPACAVVAADVAPDDPAAAAVPHWRRFSCDEDVWCIKKITSVAANGNAAPAAGDDDDWTTAPPSSVLFVDPREF

SEQ ID NO: 832 - protein, 847 aa, Oryza sativa
  misc_feature (392)..(392): Xaa can be any naturally occurring amino acid
  misc_feature (403)..(404): Xaa can be any naturally occurring amino acid
  misc_feature (847)..(847): Xaa can be any naturally occurring amino acid
MVFTEKQIHVLCKQKGCDALKPLKMPVSKAVSIEIVLHNLAKGDNGSSLMDEILHAVCSHFESKSAVIGHLAREKPEGKILEVWSEKLNGSRLRLSDVSSGISDLLSVKDATEIMYVKKAAYLTASVMKKYVVPKLEKIIADEMKVQHSKLTDLMEKILLSPTKIDVKLKAENVDICYPPIFQSGSKYDLRPAAASNNDNLYYDSGSLIVCAMGAKYSNYCSNVARTFLIDCAGEKCNAYKVLCQAHDAAIAALVPGSKASDGYQAAVSLVRDKAPDLLPFFTKSAGTGIGIEFRETWLSLNEKNDRILKEGMVFNVSLGFQNLPEKTGDYKNKEFSLLLADSVLVCKEKPHVLTAFVSKADGDVFYSFDEEKTGDGPRKTSAKSRVDAAVXKENLRSHSRTXXKEDLRKQLQAEILQKRTAEIAMNSNASNHKLLEGQGLRAMREPVAYKSTRDIPCSNRLEIQVDKQNEAILLPIYGVIVPFHYSASKSEKIEIMFCNVKHAFFQPAEKEMITLLHFHLYNDIMVGNKKTRDVQFYIEVMDTVDSVGLRRRTAWDPDEIEEEQRERARRSGINRQFELFVKRVNSIWSQPRFEQLGLQFETPSQKLGFNGVHGRTTCFIVPTPSCLVQLVESPFLVTSLREVDIVCLERVALGQKSFDMVFVFQDLKRDVIRIEVIPMTSIDGIKDWLNGCNLKYYESKLNLSWRKVLKEVMNNKESDENNRWEFLNPDASDSDSESSQTEDDQYEPSDADSCSESDDEDSDSESVVDSGEDDGAMDGSEDDGGDAAESWDEMERKARDADMEMGSESDSEDERQRRREKALAKSRCPSHPQAKGAAHKRQRINX

SEQ ID NO: 833 - protein, 1069 aa, Oryza sativa
  misc_feature (5)..(5): Xaa can be any naturally occurring amino acid
  misc_feature (10)..(10): Xaa can be any naturally occurring amino acid
  misc_feature (480)..(480): Xaa can be any naturally occurring amino acid
  misc_feature (491)..(492): Xaa can be any naturally occurring amino acid
  misc_feature (1064)..(1064): Xaa can be any naturally occurring amino acid
ALQLXNGYSXSTPANIDPSGSSSIAVSPENFIKCLKKFYHHWKEDGSNLWGSSTAIAIATPPPSDDIRYKKSLALSMWFFNRELPETIMVFTEKQIHVLCKQKGCDALKPLKMPVSKAVSIEIVLHNLAKGDNGSSLMDEILHAVCSHFESKSAVIGHLAREKPEGKILEVWSEKLNGSRLRLSDVSSGISDLLSVKDATEIMYVKKAAYLTASVMKKYVVPKLEKIIADEMKVQHSKLTDLMEKILLSPTKIDVKLKAENVDICYPPIFQSGSKYDLRPAAASNNDNLYYDSGSLIVCAMGAKYSNYCSNVARTFLIDCAGEKCNAYKVLCQAHDAAIAALVPGSKASDGYQAAVSLVRDKAPDLLPFFTKSAGTGIGIEFRETWLSLNEKNDRILKEGMVFNVSLGFQNLPEKTGDYKNKEFSLLLADSVLVCKEKPHVLTAFVSKADGDVFYSFDEEKTGDGPRKTSAKSRVDAAVXKENLRSHSRTXXKEDLRKQLQAEILQKRTAEIAMNSNASNHKLLEGQGLRAMREPVAYKSTRDIPCSNRLEIQVDKQNEAILLPIYGVIVPFHVCTVKKAEIRGDSNRGVYVCITFNVPGTASNLQDPCLKTNANRIFLKAVTFISKDRKHADEAIQLMRIIQRGVLERAKRASLVSQERLQLCDRMTRDRIQLMDLWIRPTFAGRGRKSPGILVLHVNGFQYSASKSEKIEIMFCNVKHAFFQPAEKEMITLLHFHLYNDIMVGNKKTRDVQFYIEVMDTVDSVGLRRRTAWDPDEIEEEQRERARRSGINRQFELFVKRVNSIWSQPRFEQLGLQFETPSQKLGFNGVHGRTTCFIVPTPSCLVQLVESPFLVTSLREVDIVCLERVALGQKSFDMVFVFQDLKRDVIRIEVIPMTSIDGIKDWLNGCNLKYYESKLNLSWRKVLKEVMNNKESDENNRWEFLNPDASDSDSESSQTEDDQYEPSDADSCSESDDEDSDSESVVDSGEDDGAMDGSEDDGGDAAESWDEMERKARDADMEMGSESDSEDERQRRREKALAKSRCPSHPQAKGAAHKRQRINXFSDNG

SEQ ID NO: 834 - protein, 1059 aa, Oryza sativa
  misc_feature (1)..(1): Xaa can be any naturally occurring amino acid
  misc_feature (5)..(5): Xaa can be any naturally occurring amino acid
  misc_feature (444)..(444): Xaa can be any naturally occurring amino acid
  misc_feature (474)..(474): Xaa can be any naturally occurring amino acid
  misc_feature (485)..(486): Xaa can be any naturally occurring amino acid
  misc_feature (641)..(642): Xaa can be any naturally occurring amino acid
  misc_feature (1059)..(1059): Xaa can be any naturally occurring amino acid
XGYSXSTPANIDPSGSSSIAVSPENFIKCLKKFYHHWKEDGSNLWGSSTAIAIATPPPSDDIRYKKSLALSMWFFNRELPETIMVFTEKQIHVLCKQKGCDALKPLKMPVSKAVSIEIVLHNLAKGDNGSSLMDEILHAVCSHFESKSAVIGHLAREKPEGKILEVWSEKLNGSRLRLSDVSSGISDLLSVKDATEIMYVKKAAYLTASVMKKYVVPKLEKIIADEMKVQHSKLTDLMEKILLSPTKIDVKLKAENVDICYPPIFQSGSKYDLRPAAASNNDNLYYDSGSLIVCAMGAKYSNYCSNVARTFLIDCAGEKCNAYKVLCQAHDAAIAALVPGSKASDGYQAAVSLVRDKAPDLLPFFTKSAGTGIGIEFRETWLSLNEKNDRILKEGMVFNVSLGFQNLPEKTGDYKNKEFSLLLADSVLVCKEKPHVLTAFAKLXGDVFYSFDEEKTGDGPRKTSAKSRVDAAVXKENLRSHSRTXXKEDLRKQLQAEILQKRTAEIAMNSNASNHKLLEGQGLRAMREPVAYKSTRDIPCSNRLEIQVDKQNEAILLPIYGVIVPFHVCTVKKAEIRGDSNRGVYVCITFNVPGTASNLQDPCLKTNANRIFLKAVTFISKDRKHADEVIQLMRIIQRGVXXERAKRASLVSQERLQLCDRMTRDRIQFMDLWIRPTFAGRGRKSPGILVLHVNGFQYSASKSEKIEIMFCNVKHAFFQPAEKEMITLLHFHLYNDIMVGTKKTRDVQFYIEVMDTVDSVGLRRRTAWDPDEIEEEQRERARRSGINRQFELFVKRVNSIWSQPRFEQLGLQFETPSQKLGFNGVHGRTTCFIVPTPSCLVQLVESPFLVTSLREVDIVCLERVALGQKSFDMVFVFQDLKRDVIRIEVIPMTSIDGIKDWLNGCNLKYYESKLNLSWRKVLKEVMNNKESDENNRWEFLNPDASDSDSESSQTEDDQYEPSDADSCSESDDEDSDSESVVDSGEDDGAMDGSEDDGGDAAESWDEMERKARDADMEMGSESDSEDERQRRREKALAKSRCPSHPQAKGAAHKRQRINX

SEQ ID NO: 835 - protein, 304 aa, Oryza sativa
  misc_feature (221)..(221): Xaa can be any naturally occurring amino acid
  misc_feature (237)..(237): Xaa can be any naturally occurring amino acid
MSESEVSVINQLEEEETRLELPPGFRFHPTDEEVVTHYLTRKAQDRSFSCVVIADVNLNNCEPWDLPTIAKMGEKEWFFFCHKDRKYPTGMRTNRATASGYWKATGKDKEIFRGRGLLVGMKKTLVFYMGRAPRGEKTPWVMHEYRLDGKLPPNLPRSAKEEWAVCRVFNKDLAAKIAQMPPPPFPRNDSFDLDLDDFLHLDADLPPLIDDPFASTSTLKXGATSAGQPDAQPLRPXATSPSRRQRPIITTAPAPWRTRRFGGSARRRRRRRASPAPTLTWIRWWTSCSPSRTPSRTTPTYGRP

SEQ ID NO: 836 - protein, 787 aa, Oryza sativa
  misc_feature (616)..(616): Xaa can be any naturally occurring amino acid
  misc_feature (629)..(629): Xaa can be any naturally occurring amino acid
  misc_feature (787)..(787): Xaa can be any naturally occurring amino acid
MASLASLVESKLAVLDRQLVVQSCGSFLDGFEFIPAEGTRGGLFTAWRSDRFNMSCLHKGVWSLSLCVTNLEGGASWTLTNVYGPQETEQKIQFLEELTWVGQQCVQGAWCIVGDFNLLAAESDKNNGNVNRGLINRFRGLLNTLELRELYLFGRRYTWSSEQERPTITKINKVLMNADWEDFFRDAHLQALSSSASDHCPLLLACEAMVHRSRRFKFEAFWLHLEGFEEVVRSAWDVVPAGSNALSSLHFKLRATAMALKSWGERRISELRLQLAMAHEIILRLDGAMDLRLLSHEERSLRAALKGRCLALAALERIRLRQRARLRYLKHSGTASQFFYLKINARRRKKTIPVLQQGGVWGVTEEDKLAMAHDYFLEIMGSPSPPMVALDLGRLGLPTLDLSELEIEILEDEAKKVMLEMLSDRAPGPDGFGAAFYKRCWEIVKEDVVAALNLVLNANSQHLHLLNTASIILLPKKEDPMQLADYRPISLIHSFIKLFTKGVVQRLHRAKCPAILLKLDIAKAFDTVSWEFLLELLRHLGFGVKWHDCIAVLLVSSSTTVCINGRDTQRIRLARGLRQGDPLSPLLFVLVMETFAALCATAANRGALSPLAGGVXMRDATGLVSNFAXSSITPIHCSDEQLAAVTEVLGCPVRLLPIVYLGLPLSVRKLGKADLQPMMDRLAKSLASWKPKLLALDARLAIIKHVLMVLPLYFMSVLELPVWAIKEIEKKCRGFLWKGDENAAGSCSLVAWDKLCLPIENGGLGIKDLRLMGVALRTRWPWLCRVX

SEQ ID NO: 837 - protein, 247 aa, Oryza sativa
  misc_feature (246)..(246): Xaa can be any naturally occurring amino acid
MKISGLLTSAGINIALSVLFISLYSVLRKQPANVRVYFGRRIAEEHNRLREAFILERFVPSTGWIVKALQCTEEEILAAAGLDAVVFNRILVFSLRIFSLAAILCVFGILPLNYFGQDIHHVRIPSESLDIFTIGNVKVRSRWLWVHCVALYIISGVACILLYLEYKHIARLRLRHLTCAMPNPSHFTVLVRGIPKETKESCSNAIDDFFTKYHGSSYLFHQVVYKVGKVQKIMVKSALEGMSCIXI

SEQ ID NO: 838 - protein, 537 aa, Oryza sativa
  misc_feature (4)..(4): Xaa can be any naturally occurring amino acid
  misc_feature (8)..(8): Xaa can be any naturally occurring amino acid
  misc_feature (164)..(164): Xaa can be any naturally occurring amino acid
  misc_feature (171)..(171): Xaa can be any naturally occurring amino acid
  misc_feature (177)..(177): Xaa can be any naturally occurring amino acid
  misc_feature (184)..(184): Xaa can be any naturally occurring amino acid
  misc_feature (520)..(520): Xaa can be any naturally occurring amino acid
  misc_feature (537)..(537): Xaa can be any naturally occurring amino acid
SGPXACSXLVQGHAAQHEGEGRGAPGVRARQSRHRPRRQALARPIPPREAGAVQPRVPGRVEILAALNSLFLTNGQGFASLNDALISLLPKKDEAVDVKDFRPISIIHSFGKLFSKILASRLSPRLDELVAPNQSAFIKGRSLHDNFRYVQIEARALHAKRVPXDFFSRWXYREGLXHVPPLPXVMDVLNAMLRKASDSGGFLPLNDRAIRHRASLYADDLVLFLSPVRQDLEFIQGILSVFGAASGLRTNFTKCSVTPIRCSVLDLELSSRFSVSMCRVSWTRVCRPRDLGGLGIPDLRVAGFALRVRWLWLQRSGHPYWSDLKAPIEWSVSDMFAASTFSILGDGQSTLFWTDRWIDGRSIASIAPDLLHAVPPRFRGSRTVTAGLANNSWVGDIRGALTVPVISQFLLVWDAVLPTQLSPGVEDHLVWRWTGDQCYSARSAYQAFFLGQHSFACADLLWHAKGPAKCKFFLWFAFQQRCWTADLLQKRGIDSHSACPFCAQELETANHILIDCVFAXGSWLQDWWSSSRVYLPX

SEQ ID NO: 839 - protein, 614 aa, Oryza sativa
  misc_feature (1)..(1): Xaa can be any naturally occurring amino acid
  misc_feature (160)..(160): Xaa can be any naturally occurring amino acid
  misc_feature (167)..(167): Xaa can be any naturally occurring amino acid
  misc_feature (173)..(173): Xaa can be any naturally occurring amino acid
  misc_feature (180)..(180): Xaa can be any naturally occurring amino acid
  misc_feature (297)..(297): Xaa can be any naturally occurring amino acid
XAALVQGHAAQHEGEGRGGPPGVRARQSRHRPRRQALARPIPPREAGAVQPRVPGRVEILAALNSLFLTNGQGFASLNDALISLLPKKDEAVDVKDFRPISIIHSFGKLFSKILASRLSPRLDELVAPNQSAFIKGRSLHDNFRYVQIEARALHAKRVPXDFFSRWXYREGLXHVPPLPXVMDVLNAMLRKASDSGGFLPLNDRAIRHRASLYADDLVLFLSPVRQDLEFIQGILSVFGAASGLRTNFTKCSVTPIRCSVLDLELVQSSFPCSISEFPCTYLGIPLRFSVSMAIGLXQAGFGGQCRVSWTRRSGHPYWSDLKAPIEWSVSDMFAASTFSILGDGQSTLFWTDRWIDGRSIASIAPDLLHAVPPRFRGSRTVTAGLANNSWVGDIRGALTVPVISQFLLVWDAVLPTQLSPGVEDHLVWRWTGDQCYSARSAYQAFFLGQHSFACADLLWHAKGPAKCKFFLWFAFQQRCWTADLLQKRGIDSHSACPFCAQELETANHILIDCVFARQVWLRVLSPPGWAALSPPRGSWLQDWWSSSRVYLPEHLRSGFDSLVLLVSWQLWKERNSRVFDSVLASVAVVLESIRSEGQLWSLASVTFFGVFLEM

SEQ ID NO: 840 - protein, 374 aa, Oryza sativa
MAAAATTSSHLLLLSRQQAAASLQCGLSFRRQPGRLAGGSSAPSVRCMAAVDTASAPAATEASKKSSYEITTLTTWLLKQEQAGTIDGEMTIVLASISTACKQIASLVFSNCLKSSGRTGVIASEEEDVPVAVEESYSGNYIVVFDPLDGSSNIDAAVSTGSIFGIYSPNDECLADIADDQNLDQVEQRCIVSVCQPGSNLLAAGYCMYSSSVIFVLTIGTGVYVFTLDPMYGEFVLTQEKVQIPKAGKIYAFNEGNYALWDDKLKSYMDSLKEPGPSGKPYSARYIGSLVGDFHRTLLYGGIYGYPRDQKSKNGKLRLLYECAPMSFIVEQAGGKGSDGHQRILDIMPTEIHQRVPLYIGSVEEVEKVEKFLA

SEQ ID NO: 841 - protein, 389 aa, Oryza sativa
MAAAATTSSHLLLLSRQQAAASLQCGLSFRRQPGRLAGGSSAPSVRCMAAVDTASAPAATEASKKSSYEITTLTTWLLKQEQAGTIDGEMTIVLASISTACKQIASLVQRAPISNLTGVQGAVFSNCLKSSGRTGVIASEEEDVPVAVEESYSGNYIVVFDPLDGSSNIDAAVSTGSIFGIYSPNDECLADIADDQNLDQVEQRCIVSVCQPGSNLLAAGYCMYSSSVIFVLTIGTGVYVFTLDPMYGEFVLTQEKVQIPKAGKIYAFNEGNYALWDDKLKSYMDSLKEPGPSGKPYSARYIGSLVGDFHRTLLYGGIYGYPRDQKSKNGKLRLLYECAPMSFIVEQAGGKGSDGHQRILDIMPTEIHQRVPLYIGSVEEVEKVEKFLA

SEQ ID NO: 842 - protein, 407 aa, Oryza sativa
MAAAATTSSHLLLLSRQQAAASLQCGLSFRRQPGRLAGGSSAPSVRCMAAVDTASAPAATEASKKSSYEITTLTTWLLKQEQAGTIDGEMTIVLASISTACKQIASLVQRAPISNLTGVQGAVNVQGEDQKKLDVVSNEVFSNCLKSSGRTGVIASEEEDVPVAVEESYSGNYIVVFDPLDGSSNIDAAVSTGSIFGIYSPNDECLADIADDQNVLDQVEQRCIVSVCQPGSNLLAAGYCMYSSSVIFVLTIGTGVYVFTLDPMYGEFVLTQEKVQIPKAGKIYAFNEGNYALWDDKLKSYMDSLKEPGPSGKPYSARYIGSLVGDFHRTLLYGGIYGYPRDQKSKNGKLRLLYECAPMSFIVEQAGGKGSDGHQRILDIMPTEIHQRVPLYIGSVEEVEKVEKFLA

SEQ ID NO: 843 - protein, 578 aa, Oryza sativa
  misc_feature (59)..(60): Xaa can be any naturally occurring amino acid
  misc_feature (368)..(368): Xaa can be any naturally occurring amino acid
SQDSTITMTICSCEETINEFEMLTRDAARVQKDTLKKILEINASAEYLQNFGLGGRTDXXESYKSCIPLCVHNDIEPYIQRIVDGDTSPVVTGEPITNLSLSSGTTHGKPKFIPFNDELLETTLQIYRTSYAFRNREYPIGQGKALQFVYGSKQVITKGGILATTATTNLYRRQRYKEGMKDIQSQCCSPDEVIFGPDFHQSLYCHLLCGLIYSEEVHSVFSTFAHSLVHAFQTFEEVWEDLCTDIRDGVLSKKVTAPSIREAVSKILKPNPELADSIYKKCIGLSNWYGVIPALWPNAKYVYGIMTGSMEPYLKKLRHYAGNLPLISADYGASEGWVGSNIDPTVPPEQVTYAVLPQVGYFEFIPLXETNRGESDPVGLTEVEVGKIYEVVITNFAGLYRYRLGDVVKIARFHNSTPELQFICRRSLVLSINIDKNTEKDLQLAVEEASKFLEGEKLEVMDFTSFVERSSDPGRYVIFWELSGDASDEVLSSCANALDLAFIDAGYTGSRKIKTIGPLELRILRKGTFKEILDHFLSLGGAVSQFKTPRFVNPSNSKVLQILSRNVTQSYFSTAYGF

SEQ ID NO: 844 - protein, 179 aa, Oryza sativa
  misc_feature (8)..(9): Xaa can be any naturally occurring amino acid
  misc_feature (123)..(123): Xaa can be any naturally occurring amino acid
SIVVTELXXGKSRERESQSFDVLEHRCEKTKKKRSKKPPRPPRPPTPTPLDVSDQKLLNELSELAILKRARIERMKALKKMKNAKHGSSSGNLFPLIITIIFCLVILWQGFFSRTGSAVSFPXDHPESSVRAHSSLISIRFYKSNNSNSRSREAISAAPKNAETPSRLEIHSKARKITR

SEQ ID NO: 845 - protein, 139 aa, Triticum aestivum
  misc_feature (111)..(112): Xaa can be any naturally occurring amino acid
  misc_feature (122)..(122): Xaa can be any naturally occurring amino acid
MARATSAALALLIFLLCRHAHADAGTTLSQGQSLAGNEKLLSANGAFSLSFFSPRGGDGSRVYLGVMFARAAEPTVPWVANRDAPVRATAPSYSATVTDSGDLRVLEGERXXVWRTNTTSSXGNFTLTIQDTGEPRARR

SEQ ID NO: 846 - protein, 164 aa, Triticum aestivum
  misc_feature (1)..(1): Xaa can be any naturally occurring amino acid
XTAYFRMLLNRESITNSVAMIQPSLISFSFDSPPSPVFLDVASIAADRILLLDAYFSVVIFHGMTIAQWRNMGYQNQPEHEQFAQLLQAPHEDAQMIIKGRFPVPRLVVCDQHGSQARFLLAKLNPSATYNSAHDVAPGSDIIFTDDVSFQVFCEHLQRLAVQS

SEQ ID NO: 847 - protein, 293 aa, Triticum aestivum
MDQYEKVEKIGEGTYGVVYKAKDRYTNETIALKKIRLEQEDEGVPSTAIREISLLKEMQHRNIVRLQDVVHNEKCIYLVFEYLDLDLKKHMDSSADFKNHHIVKSFLYQILHGIAYCHSHRVLHRDLKPQNLLIDRRTNSLKLADFGLARAFGIPVRTFTHEVVTLWYRAPEILLGARQYSTPVDVWSVGCIFAEMVNQKPLFPGDSEIDELFKIFRIMGTPNEETWPGVSSLPDYKSAFPKWPSVDLATVVPTLEPLGLDLLSKMLCLDPTRRINARTALEHEYFKDLDVSS

SEQ ID NO: 848 - protein, 387 aa, Triticum aestivum
  misc_feature (9)..(10): Xaa can be any naturally occurring amino acid
  misc_feature (387)..(387): Xaa can be any naturally occurring amino acid
MSVSSSSMXXGGDAGMKCVVWFRRDLRVEDNPALAAAARTAGEVVPAYVWSPEEDGPYFPGRVSRWWLSQSLKHLEASLHRLGAAKLVTRRSPDSVAALLQLVRDTGATHLFFNHLYDPISLVRDHRLKEMMTAEGIVVQSFNADLLCDPWEVNDDKGQPFNMFMPFWNRCLSMPYDPPAPLLPPKRINSGDLSMCPSDDLIFEDESERGSNALLARAWSPGWQNADKALSAFLNGPLIDYSVNRKKADSANTSLLSPYLHFGELSVRKVFHLVRMKQLVWSNEGNHAAEESCTLFLRSVGLREYSRYLCFNHPCSHEKPLLAHLRFFPWVVDESTFKFWRQGRTGYPLVDAGMRELWATGWLHDRIRVVGSSFFVKVLQLPWRWGX

SEQ ID NO: 849 - protein, 164 aa, Triticum aestivum
  misc_feature (156)..(156): Xaa can be any naturally occurring amino acid
MGRPPSSDENGLKKGPWTTEEDEKLMSYIQKHGHGSWRSLPQLAGLNRCGKSCRLRWTNYLKPDIKRGKFSQEEEQTILQLHTVLGNKWSAIAKHLPGRTDNEIKNFWNTHLRKKLIKMGIDPMTHRPRTDFFAALPQLIALANLRQFINQQPMGXPHRRAASS

SEQ ID NO: 850 - protein, 414 aa, Triticum aestivum
  misc_feature (76)..(76): Xaa can be any naturally occurring amino acid
  misc_feature (86)..(86): Xaa can be any naturally occurring amino acid
  misc_feature (362)..(363): Xaa can be any naturally occurring amino acid
MCTVSSAWRLRPFHHAPVLFPFPSLAPPLPEPSRLPLRMADAKAEAARQAPQSSQEEEEDWKEAEGDVEVADRSTXAMAAAPARGXTDRPIRVYADGIYDLFHFGHARSLEQAKKSFPNAYLLVGCCNDELTHQYKGRTVMTEDERYESLRHCKWVDEVIPDAPWVVTEEFLNKHNIDFVAHDSLPYHDASGASNDVYEFVKKLGKFKETKRTEGISTSDIIMRIVKDYNEYVMRNLARGYSRNDLGVSYVKEKRLRVNMGLKTLRDKVKQHQEKVGEKWSTVAKLQEEWVENADRWVVGFLEKFEEGCHSMGTAIKERIQERLKEAQSRDFSLLQYDSDDFDDFEEEDDEVAKDAKYVKEXXRHCKILRQKYNTGMQCMLTVFVNHNPSPCICPFDCELHCQGRSACCVCSCT

SEQ ID NO: 851 - protein, 267 aa, Triticum aestivum
  misc_feature (267)..(267): Xaa can be any naturally occurring amino acid
RTLGQGDADCSEHVNDILAQVATKTESNKNAGNAILYECVETIMGIEATSGLRVLAINILGRFLSNRDNNIRYVALNMLMKAMAVDTLAVQRHRVTILECVKDADVSIRKRALELVYLLVNDTNVKPLTKELVDYLQVSDDDFKEDLTAKICSIVEKFSQDKLWYLDQMFKVLTLTGNFVKDDVWHSLIVLISNASELQGYSVRSLYKALQACGTQESLVRVAVWCIGEYGEMLVNHISMLDVEEPITVTESDAVDALELALKRYFX

SEQ ID NO: 852 - protein, 162 aa, Triticum aestivum
  misc_feature (5)..(5): Xaa can be any naturally occurring amino acid
  misc_feature (10)..(10): Xaa can be any naturally occurring amino acid
  misc_feature (19)..(19): Xaa can be any naturally occurring amino acid
  misc_feature (97)..(98): Xaa can be any naturally occurring amino acid
  misc_feature (119)..(119): Xaa can be any naturally occurring amino acid
VFAFXVFLLXLISAEPVAXSHMSLLAWAKPYLKDGVVQGLVDPRLGDGGYDAGQLRRLMFVASLCARSAAAWRPTMTEVLELLESSAEISQERWQMXXEEAVEDEFWDFDDLTDFEDDXTTTTTTMTTTANRIPPRYPRRPAASAPMIDYISPHPDLFCSCQ

SEQ ID NO: 853 - protein, 96 aa, Triticum aestivum
  misc_feature (1)..(1): Xaa can be any naturally occurring amino acid
  misc_feature (8)..(8): Xaa can be any naturally occurring amino acid
XAAASTDXGCKYYARDFRGVVPSYKIQQVDTTGAGDAFVGALLRKIVQDPSSLQNQEKLEEAIKFANACGAITTTKKGAIPSLPTEIEVLQLMENA

SEQ ID NO: 854 - protein, 791 aa, Triticum aestivum
  misc_feature (2)..(2): Xaa can be any naturally occurring amino acid
  misc_feature (9)..(9): Xaa can be any naturally occurring amino acid
  misc_feature (56)..(56): Xaa can be any naturally occurring amino acid
  misc_feature (99)..(99): Xaa can be any naturally occurring amino acid
  misc_feature (138)..(138): Xaa can be any naturally occurring amino acid
  misc_feature (142)..(142): Xaa can be any naturally occurring amino acid
  misc_feature (146)..(146): Xaa can be any naturally occurring amino acid
  misc_feature (178)..(178): Xaa can be any naturally occurring amino acid
AXAYSPRAXIDPWVFQCGSGAGASQLVALNLQPDATGSFVEILERYVQHGPIVDVXLADLGRQGQAQGVCHPVPVKLGGDRLVRMGDGLDEQASSWVQXNQVLASLQSSPRPLFDMCLIRAILRELRYVDMNMNDDLXEEHXIVGXNRQIPTMSCQNAFASLPMDATAPFFRMETRPXQPLVRSCHVVESFLGDVTSDKGGQVMLLFGLVDLVFLEIGDAKRVKVKHAQQEHDISCVDFNPVGENPQYSSLAAIGMWTDISVSIFSLPDLELIRKENLGVEIVPRSVLMCTLEGISYLLCALGDGHLFSFLLNASTGELTDRKKVSLGTQPISLRTFSSKGTTHVFASSDRPTVIYSSNKKLLYSNVNLKEVNHMCPFNTAAFPDSLAIAKEGELSIGTIDDIQKLHIRTIPLNEQARRICHQEQSRTLAFCSFKYTQNSMEESEAHFIRLMDHQTFEFLSTHPLDQYECGCSMISCSFSDDNNFYYCVGTAYVLPEENEPTKGRILVFAVEDGRLQLIVEKETKGAVYSLNAFNGKLLAAINQKIQLYKWMTREDGSHELQSECGHHGHILALYTQTRGDFIVVGDLMKSISLLVYKHEESAIEELARDYNANWMTAVEMIDDDIYVGAENSYNLFTVRKNSDAATDEERGRLEVVGEYHLGEFVNRFRHGSLVMRLPDSEMGQIPTVIFGTINGVIGIIASLPHDHYVFLEKLQTTLVKFIKGVGSLSHEQWRSFHNDKKTSEARNFLDGDLIESFLDLNRSKMEEVAKAMAVPVEELSKRVEELMRLH

SEQ ID NO: 855 - protein, 146 aa, Triticum aestivum
  misc_feature (1)..(1): Xaa can be any naturally occurring amino acid
  misc_feature (27)..(27): Xaa can be any naturally occurring amino acid
  misc_feature (143)..(143): Xaa can be any naturally occurring amino acid
XIRARERALFFASTTMTIGNGQHTLFXWEDRWINGRAIREIAPLLYALIPKRRRKSRTVADGLHANQWATDIHGMIGIPEIGEYLRLWHMLAETSLSDAPDCIRWKWTANGEYSAKSTYLATFHGSTRCQAWKLTWKCWAPPXGAL

SEQ ID NO: 856 - protein, 153 aa, Triticum aestivum
  misc_feature (152)..(152): Xaa can be any naturally occurring amino acid
MASSGSLHPALLVLLLLAVVATASTTTTTFVRAGAPPADLAQRLQGVGQQQCWEILMDIRSCTGEIILFFLNGEAYLGPGCCRAIRAIEQRCWAADAMLSVIGFTAEEGDMLKGYCDAGDSGEGQHHGALDGVASDGAVAAAAGRKGLGAPXS

SEQ ID NO: 857 - protein, 336 aa, Triticum aestivum
MAPLGDAVAPASAAAPGLVVSFGEMLIDFVPDVAGVSLAESGGFVKAPGGAPANVACAISKLGGSSAFIGKFGDDEFGHMLVEILKQNGVNAEGCLFDQHARTALAFVTLKSNGEREFMFYRNPSADMLLTEAELNLDLIRRARIFHYGSISLITEPCRSAHVAAMRAAKSAGILCSYDPNVRLPLWPSAQAARDGIMSIWKEADFIKVSDEEVAFLTQGDATDEKNVLSLWFEGLKLLIVTDGEKGCRYFTKDFKGSVPGYSVNTVDTTGAGDAFVGSLLVSVSKDDSIFYNEAKLREVLQFSNACGAICTTKKGAIPALPTTATALELISKGSN

SEQ ID NO: 858 - protein, 306 aa, Triticum aestivum
  misc_feature (12)..(12): Xaa can be any naturally occurring amino acid
  misc_feature (102)..(102): Xaa can be any naturally occurring amino acid
WIPRAAGIRHEXTRFFVDNGTYLTEQGRFFLAWYSNNLIKHGDKILDEANKVFLGHRVQLAIKISGIHWWYKAPSHAAELTAGYYNLHDRDGYRPIARMLKXHHASLNFTCAEMRDSEQSSQAMSAPEELVQQVLSAGWREGLNMACENALPRYDPTAYNTILRNARPHGINKSGPPEHKLFGFTYLRLSNQLVEGQNYVNFKTFVDRMHANLPHDPCVDPVAPLQRSGPELTIEMILQAAQPKLEPFPFEEHTDLPVQGLGGIGGGEVEDPTGGMGGEVQHPTGGMGGEVEDPTGGMGGELPPTV

SEQ ID NO: 859 - protein, 527 aa, Triticum aestivum
  misc_feature (19)..(19): Xaa can be any naturally occurring amino acid
  misc_feature (496)..(497): Xaa can be any naturally occurring amino acid
MEASVQQGNYVQVYVMLPXLDAVSVNNRFEKGDELRAQLKRLVEAGVDGVMVDVWWGLVEGKGPRAYDWSAYKQLFQLVHEAGLKLQAIMSFHQCGGNVGDVVNIPIPQWVRNVGASDPDIFYTDQHGTRNIEYLTLGVDDQPLFHGRSAVQMYADYMASFRDNMKEFLDAGVIVDIEVGLGPAGELRYPSYPQSHGWSFPGIGEFICYDKYLQADFKAAAAMVGHPEWEFPHDAGTYNDTPERTRFFVDNGTYLTEQGRFFLAWYSNNLIKHGDKILDEANKVFLGHRVQLAIKISGIHWWYKAPSHAAELTAGYYNLHDRDGYRPIARMLKRHHASLNFTCAEMRDSEQSSQARSAPEELVQQVLSAGWREGLNVACENALPRYDPTAYNTILRNARPHGINKSGPPEHKLFGFTYLRLSNQLVEGQNYVNFKTFVDRMHANLPHDPCVDPVAPLQRSGPELTIEMILQAAQPKLDPFPFEEHTDLPVQGLGGXXGGDVEGPTGGMGGEVQDPTGSMGGELPATV

SEQ ID NO: 860 - protein, 503 aa, Triticum aestivum
MAGNMLANYVQVYVMLPLDVVSVDNKFEKGDEIRAQLKKLTEAGVDGVMIDVWWGLVEGKGPKAYDWSAYKQVFDLVHEAGLKLQAIMSFHQCGGNVGDVVNIPIPQWVRDVGATDPDIFYTNRGGTRNIEYLTLGVDDQPLFHGRTAVQMYADYMASFRENMKKFLDAGTIVDIEVGLGPAGEMRYPSYPQSQGWVFPGIGEFICYDKYLEADFKAAAAKAGHPEWELPDDAGEYNDTPEKTQFFKDNGTYLTEKGKFFLSWYSNKLIKHGDKILDEANKVFLGCRVQLAIKISGIHWWYRVPNHAAELTAGYYNLDDRDGYRTIARMLTRHHASMNFTCAEMRDSEQSEEAKSAPEELVQQVLSAGWREGLHVACENALGRYDATAYNTILRNARPKGINKNGPPEHKLFGFTYLRLSNELLEGQNYATFQTFVEKMHANLGHDPSVDPVAPLERSKPEMPIEMILKAAQPKLEPFPFDKNTDLPVKDHTDVGDEVLVAPV

SEQ ID NO: 861 - protein, 284 aa, Triticum aestivum
  misc_feature (1)..(1): Xaa can be any naturally occurring amino acid
  misc_feature (3)..(3): Xaa can be any naturally occurring amino acid
  misc_feature (10)..(10): Xaa can be any naturally occurring amino acid
  misc_feature (15)..(16): Xaa can be any naturally occurring amino acid
  misc_feature (18)..(18): Xaa can be any naturally occurring amino acid
  misc_feature (150)..(150): Xaa can be any naturally occurring amino acid
  misc_feature (262)..(262): Xaa can be any naturally occurring amino acid
XRXRPTPSVXPTPSXXNXSEVTISLEENESVVLTPHQGQEASSKLLPINFAGLAKAVKPGATIFVGQYLFTGSETTSVWLEVSEVQGDDVVCVIKNSATLAGSLFTLHCSQIHIDMPTLSDEDKDVMKKWGAPNKIDFLSLSYTRHAEDXAETLRGLYPVETISTVGRICAEAEKVFNQDLYFKRTVKYVGEPMTHLESIASSAVRAAIKVKASVIICFTSSGRAARLIAKYRPTMPVLSVVIPRLKTNQLKWSFTGAFEVXFSLVYSLFPCNLFATFFCMCYI

SEQ ID NO: 862 - protein, 449 aa, Triticum aestivum
  misc_feature (87)..(87): Xaa can be any naturally occurring amino acid
  misc_feature (108)..(108): Xaa can be any naturally occurring amino acid
  misc_feature (124)..(124): Xaa can be any naturally occurring amino acid
  misc_feature (401)..(402): Xaa can be any naturally occurring amino acid
RVAAGMYVPQSSRGGGGSAGEQPRVYQVCRGSNEFLLQGRFIFGPDVRFFFLTIFLILAPVLVFCIFVSRHLINEVKYHWGILIFLXCVVLVSSYAVWHIFIIGNSVXKIVPRNTHPPEPESLXDGNNDTGNGQTPQQLRLPRTKDVYVNGVVVKVKYCDTCMLYRPPRCSHCSICNNCVERFDHHCPWVGQCIGLRNYRFFYMFVFSTTLLCLYVFGFCWVYIIKIRDAEGSSIWRAMLKTPASMVLIIYCFICVWFVGGLSVCHFYLMSTNQTTYENFRYRYDRRANPYNVGVVNNFLEIFCTAVPASKNNFRARVPVEQGLQQSRPPTRGFMSPNMGKPVGDLELGRKPVSWDEPRSGADIRDLGVGGMLDEKEGRITHASPDLSREALPVELMEGRXXGMHSRRSSWGHRSGTSESMDSIAVQMGGGETNWGSVSSGHGTTSGTH

SEQ ID NO: 863 - protein, 527 aa, Triticum aestivum
MHSTNLLLEEPIRMVSILEPSKPNFFPAMTKIVGTLGPKSRSVEAISACLKAGMSVARFDFSWGDAAYHQETLENLKLAIKATKKLCAVMLDTVGPELQVVNKSEVTISLEENESVVLTPHQGQEASSKLLPINFAGLAKAVKPGATIFVGQYLFTGSETTSVWLEVSEVQGDDVVCVIKNSATLAGSLFTLHCSQIHIDMPTLSDEDKDVMKKWGAPNKIDFLSLSYTRHAEDVRQAREFLSKLGDLSQTLIFAKIENVEGLNHFDEILEEADGIILSRGNLGIDLPPEKVFLFQKSALHKCNMAGKPAVVTRVVDSMTDNLRPTRAEATDVANAVLDGSDAILLGAETLRGLYPVETISTVGRICAEAEKVFNQDLYFKRTVKYVGEPMTHLESIASSAVRAAIKVKASVIICFTSSGRAARLIAKYRPTMPVLSVVIPRLKTNQLKWSFTGAFEARQSLIVRGLFPMLADPRHPAESTSTTNESVLKVALDHGKASGVIKSHDRVVVCQKVGDSSVVKIIELDD

SEQ ID NO: 864 - protein, 199 aa, Triticum aestivum
  misc_feature (1)..(1): Xaa can be any naturally occurring amino acid
  misc_feature (4)..(4): Xaa can be any naturally occurring amino acid
  misc_feature (158)..(158): Xaa can be any naturally occurring amino acid
  misc_feature (163)..(163): Xaa can be any naturally occurring amino acid
  misc_feature (166)..(166): Xaa can be any naturally occurring amino acid
  misc_feature (168)..(168): Xaa can be any naturally occurring amino acid
  misc_feature (170)..(170): Xaa can be any naturally occurring amino acid
  misc_feature (174)..(174): Xaa can be any naturally occurring amino acid
  misc_feature (176)..(176): Xaa can be any naturally occurring amino acid
  misc_feature (182)..(182): Xaa can be any naturally occurring amino acid
  misc_feature (190)..(190): Xaa can be any naturally occurring amino acid
  misc_feature (193)..(194): Xaa can be any naturally occurring amino acid
  misc_feature (196)..(198): Xaa can be any naturally occurring amino acid
XGKXEMLVPAGDTSQFIPSKEADIAILEEPEHLNWYHHGKRWTDKFNHVVGVVHTNCLEYIKREKNGAIQALGVKHINNLVARAYCHKVLRLSGATQDLARSMICNVHGVNPKFLEVGERIAAERESGEQSMSKGAYFLGKMVWAKGYRELIDFLRRXNGFDXFNXDXYXNGEXSXKAITAXTGLNLLHXFFXXTXXXP

SEQ ID NO: 865 - protein, 297 aa, Triticum aestivum
  misc_feature (1)..(1): Xaa can be any naturally occurring amino acid
  misc_feature (102)..(102): Xaa can be any naturally occurring amino acid
  misc_feature (145)..(146): Xaa can be any naturally occurring amino acid
  misc_feature (163)..(164): Xaa can be any naturally occurring amino acid
  misc_feature (241)..(241): Xaa can be any naturally occurring amino acid
  misc_feature (245)..(245): Xaa can be any naturally occurring amino acid
XHNASDKPNVPMCPPRSDHRKEKSLGLLTQNFVKLFLTMEVETVSLDEAARLLLGERHAESNMRTKVRRLYDIANVLSSLNLIEKTQQVDSRKPAFRWLGQXQSERKVPLSRLLYQIMSSKRAFGTDITNIDNKRGKLVLETENXXPKLMQGGSSMLKTFESXXLGQGKSSGFVYGPFHPGKETYDQTVRENEMKNIQDWENLAVSFRPQYQNHALNDLFGHYVEAWKSWYLDLTRESTSXRMVXFRQVCCKSVLVGRSTHLPRTLERIRPVQDVIKAQRLISPLLDVFTQCKKETE

SEQ ID NO: 866 - protein, 179 aa, Triticum aestivum
MADHLQVQQQHQHQLELPSGFRFHPTDEEIITSYLVPKVLNPTFTAIAIAEVDLNKNDPYELPKKAKMGEKEWYFYCQKDRKYPTGIQTNRATKAGYWKATGKDKEIFHPLPTLIGMKKTLVFYKGRAPRGEKTNWVMHEYRLEGISKQPAYGPSTAIAKAAAINASSKKGRGGGKIFH

SEQ ID NO: 867 - protein, 366 aa, Triticum aestivum
  misc_feature (1)..(1): Xaa can be any naturally occurring amino acid
  misc_feature (8)..(8): Xaa can be any naturally occurring amino acid
XKMLSFCXAAAPPSSGMDFGRSNEQRLLLARSKMPFTPSQWMELEHQALIYKYLNAKAPIPSGLLISISKSFRPSSDRMPWRPVYQGFTNADSDPEPGRCRRTDGKKWRCSKEAMAEHKYCERHINRNRHRSRKPVENQTRKNAKETPDAGSLSAAVSHGGYKKAKAGDELKPGSVSYWTDNLNRAMVSKARGSNPEDGNSAPLLNSTNQQHTLSLFSQLKQQSKPDKFIPAVDSESISSNTVLKPWERSNQQSSKDVSSTTLHDRGCLQSVLQDFSMHKNDKIESQKNNASVPSTFYSSTEGRHISCLASNMMQVQEDCISSSWEIPQGGPLGEILTNSKNTDDLTNKCESRSYGWLLSLDEHEM

SEQ ID NO: 868 - protein, 227 aa, Triticum aestivum
  misc_feature (213)..(213): Xaa can be any naturally occurring amino acid
MAAAAQRLLAASTKIVGVGRNYVAHAKELGNPVPKEPVLFLKPTSSFLHAGVATAAVEVPEPLESLHHEVELAVVISRRARDVPEASAMDFVGGYALALDMTARDLQSVAKSTGLPWTLAKAQDTFTPISAVVPKSAVPNPDDLELWLKVDDELRQKGPTSDMIFKVPFLISYISSIMTLMEGDVILTGTPEGVGPVRIGQKIKAGITGLIEXAEFDVQRRSRTFSP

SEQ ID NO: 869 - protein, 353 aa, Triticum aestivum
  misc_feature (13)..(13): Xaa can be any naturally occurring amino acid
  misc_feature (19)..(19): Xaa can be any naturally occurring amino acid
  misc_feature (40)..(41): Xaa can be any naturally occurring amino acid
  misc_feature (346)..(346): Xaa can be any naturally occurring amino acid
CKAYPSINGDLHXVCLVCXLCLLSPLLPRRRPFGNPGYGXXLFPQFYDHSCPKAKEMVHSIVAQAVARETRMAASLVRLHFHDCFVKGCDASVLLDNSTNIVSEKGSNPNRNSIRGFEVVDQIKVALETACPGTVSCADILALAARDSTVLVGGPYWDVPLGRRDSLGASIQGSNNDIPAPNNTLPTIITKFNRLGLNIVDVVALSGGHTIGLCRCTSFRQRLYNQSGNGLADSTLDMSYAAQLRQGCPRSGGDNNLFPLDAVSSTKFDNFYFKNILAGRGLLSSDEVLLTKSPETAALVKAYADDVHLFFQHFAQSMVNMGNISPLTGSKGEIRKNCRRLNNSHXVFGPPRL

SEQ ID NO: 870 - protein, 621 aa, Triticum aestivum
MAHGDRMTTFEEGERESEYGYVRKVSGPVVVADGMGGAAMYELVRVGHDSLIGEIIRLEGDSATIQVYEETAGLTVNDPVLRTKKPLSCELGPGILGNIFDGIQRPLKTIAIKSGDVYIPRGVSVPALDKDQQWEFQPNKLGVGDNITNGDLYATVFENTLMKHHIALPPGAMGKISYIAPAGQYSLQDTVLELEFQGIKKEFTMLHTWPVRTPRPVASKLAADTPLLTGQRVLDALFPSVLGGTCAIPGAFGCGKTVISQALSKYSNSDTVVYVGCGERGNEMAEVLMDFPQLTMTLPDGREESVMKRTTLVANTSNMPVAAREASIYTGITIAEYFRDMGYNVSMMADSTSRWAEALREISGRLAEMPADSGYPAYLASRLASFYERAGKVQCLGSPDRTGSVTIVGAVSPPGGDFSDPVTSATLSIVQVFWGLDKKLAQRKHFPSVNWLISYSKYSTALEGYYEKFDPGFIDMRTKAREVLQREDDLNEIVQLVGKDALGESDKITLETAKLLREDYLAQNAFTPYDKYCPFYKSVWMMRNIIHFNTLANQAVERAANADGHKITYAVVKSRMGDLFYRLVSQKFEDPAEGEDVLIAKFQKLYDDLTTGFRNLEDEAR

SEQ ID NO: 871 - protein, 409 aa, Triticum aestivum
MAAATTTASRPLLLSRQQAAASSLQCRLPRRPGSSLFAGQGQASTPNVRCMAVVDTPSAPAVAPARKRSSYDMITLTTWLLKQEQEGVIDNEMTIVLSSISTACKQIASLVQRAPISNLTGVQGATNVQGEDQKKLDVISNEVFSNCLRWSGRTGVIASEEEDVPVAVEESYSGNYIVVFDPLDGSSNIDAAVSTGSIFGIYSPSDECHIGDDATLDEVTQMCIVNVCQPGSNLLAAGYCMYSSSVIFVLTIGTGVYVFTLDPMYGEFVLTQEKVQIPKSGKIYSFNEGNYALWDDKLKKYMDSLKEPGTSGKPYSARYIGSLVGDFHRTMLYGGIYGYPSDQKSKNGKLRLLYECAPMSFIAEQAGGKGSDGHQRVLDIMPTEVHQRVPLYVGSVEEVEKVEKFLSSE

SEQ ID NO: 872 - protein, 116 aa, Triticum aestivum
  misc_feature (1)..(1): Xaa can be any naturally occurring amino acid
XWEYLHVITGRSAIVVGVVALFTGMKHLGQRYDSENVEELTWALMLWVLSAIVIALSLEYKEVKRRGGDRSFRGHWVLGNTEEDDSVDLLHPDSSARSSESRPSGVMEVQLEPLTR

SEQ ID NO: 873 - protein, 79 aa, Triticum aestivum
LKVDDELRQKGPTSDMIFKVPFLISYISSIMTLMEGDVILTGTPEGVGPVRIGQKIKAGITGLIEAEFDVQRRSLTFSS

SEQ ID NO: 874 - protein, 136 aa, Triticum aestivum
  misc_feature (136)..(136): Xaa can be any naturally occurring amino acid
VWPADCTAMEYIEQFDRDGDCMIENDGFPDQTYDAWTVLGVSAYCGCLWLAALQAAAAMARSLGHDDYADRCMVKFAKAKHVFEAKLWNGSYFNYDSGTSYSSHSIQADQLGGQWDTASSGFAPLFDEDRIKCTLX

SEQ ID NO: 875 - protein, 144 aa, Triticum aestivum
  misc_feature (14)..(14): Xaa can be any naturally occurring amino acid
  misc_feature (144)..(144): Xaa can be any naturally occurring amino acid
SANQKAAFTEILDXLRAICHAHMLPLALTWVPSSNGSDGGYVGHDSVLDSQSGKAILRIHESACYVNDAKMQGFFHACTETHLEKGQGIAGRALKSNLPFFSPNIREYGIKDYPLAHHARKFGLHAAVTIRLKSTYTGDDDYIX

SEQ ID NO: 876 - protein, 230 aa, Triticum aestivum
  misc_feature (1)..(1): Xaa can be any naturally occurring amino acid
  misc_feature (185)..(185): Xaa can be any naturally occurring amino acid
  misc_feature (230)..(230): Xaa can be any naturally occurring amino acid
XFVRVGVGSPPMEQYLVVDSGSDVIWVQCRPCAECYQQADPLFDPAASASFAVVPCGSGVCRTLRSSGCADSGACRYQVSYGDGSFTQGVLAMETLTFGDSTPVQGVAIGCGHRNRGLFVGAAGLLGLGWGPMSLVGQLGGAAGGAFSYCLASRGADAGAGSLVFGRDDAMPVGAVWVPLLRNAXEPSFYYVGLTGLGVGGERLPLQDGLFDLIEDGGGGVVLDTRTAVX

SEQ ID NO: 877 - protein, 207 aa, Triticum aestivum
  misc_feature (184)..(184): Xaa can be any naturally occurring amino acid
  misc_feature (193)..(193): Xaa can be any naturally occurring amino acid
ENASDHGDFYNEIMAEQYGKLCIALDVLHECFVTIIEPRTRRDLSEDIVFNRESGLRRLNFRGFYTILLQKDGELISVGTFRVCGKKFAELPLIGTRIQYRRQGMCRLLMNELEKLLSGLGVERLILPAIPQLLETWTGSFGFTAMSCSQRFELAESSILSFQGTTICQKILVKKALQWGVRRXRPTGSLSCXLEIRSNSSEEGNCA

SEQ ID NO: 878 - protein, 154 aa, Triticum aestivum
HRRRSHQHFHLSCWHYCSFCHSGRSHQHFHPSCWHYCSFRHRRRSHQHFHPSCWHYCRFRHHHHSHQHFHLSCWHYCRFRHRHHSHQYFHPSCWHYCSFRHRRRSHQNFHQSCSHYCRFHHHYHSYHHFRPSCWHYCSFRHHRHSHQQQHCCSC

SEQ ID NO: 879 - protein, 437 aa, Triticum aestivum
  misc_feature (93)..(93): Xaa can be any naturally occurring amino acid
  misc_feature (135)..(135): Xaa can be any naturally occurring amino acid
  misc_feature (204)..(204): Xaa can be any naturally occurring amino acid
PSRQTDSSLGTRTTPPRSDAAEDRIGRARPWLLLRRRRPFLSSPSPPRSSFRPAALASPQKVGDGKVIDLDDSPSAAALTSIDFLFRHGDAPXCGHCKRLAQQLRGGPQVLGGSSEPIIVAKVNAEQCTKLGSKXGLDRFPSLMRFAHDGPHRKSGQVQERLLQNIVGTGVAPHVSTSVLYPLIKIVGANVPMFFAMWGRLLHXLLMMEENTRKEKDLAWLAVAKDCSEDWMATYDFSKIPALVAAHPKHSVQSVFYGPCEGRFLEVFVRPPLRPLTGPVNAEALGLLDGGDRKVGLAMWEVGAGVNAAQLVKILRSAAHANRDLVFGYVGVKQWEEFVETFDVSKSSQLPKLLVWDRNEEYELVEGSEKLEEGDQASQLSQFLEGYRAGRTIKKKVSGPSFMGFMHSLVSMNSLYILMFVVALLGVMMPLVLYWPR

SEQ ID NO: 880 - protein, 327 aa, Triticum aestivum
  misc_feature (1)..(1): Xaa can be any naturally occurring amino acid
  misc_feature (48)..(49): Xaa can be any naturally occurring amino acid
  misc_feature (170)..(170): Xaa can be any naturally occurring amino acid
  misc_feature (179)..(179): Xaa can be any naturally occurring amino acid
XVRGRVGKPPKSAIRIFPQFQTPPRPARPLLPLRPHGDLHRFARRGGXXSQHSQEEKRWVLSDFDVGKALGRGKFGHVYLAREKRSSQIVALKVLFKSQLKQSQVEHQLRREVEIQSHLRHPNILRLYGYFYDQTRVYLILEHAAKGELYKELQRCKHFSERRSATYIAXLQQMQAFFXKTLGILRGINPENPFIGVQGELKIADFGWSVHTFNRRRTMCGTLDYLPPEMVEKTEHDYHVDIWSLGILCYEFLYGRPRFDAKEHSETYRRIVKVDLKFPLKPFVSPAAKVLISQMLVKNSAHRLPLHKVLEHPWIVQNADPSGVYRG

SEQ ID NO: 881 - protein, 390 aa, Triticum aestivum
  misc_feature (1)..(1): Xaa can be any naturally occurring amino acid
XTPARTGPPSAVRRHASDKMGLEAAVEATVEFLNKAVKPVLVAGPKLRVAKAGKAFVDLVDASGYAYAIMPSAKGFVPETHPHFLGTYWGAVSTAFCAEIVESADAYLFAGPIFNDYSSVGYSFLLKKDKAIIVQPERVIVGNGPAFGCVMMKEYLSALAKRVQKNTTAYENYKRIFVPEGHPLKGEANEPLRVNVLFKHIQDMLTGDSAVLAETGDSWFNCQKLKLPEGCGYEFQMQYGSIGWSVGALLGYAQGASDKRVIACIGDGSFQVTAQDVSTMLRCEQNSIIFLINNGGYTIEVEIHDGPYNVIKNWNYTALVEAIHNGEGKCWTAKVKCEEELTAAIGSALGEKKDSLCFIEVIAHKDDTSKELLEWGSRVSAANSRPPNPQ

SEQ ID NO: 882 - protein, 96 aa, Triticum aestivum
  misc_feature (1)..(1): Xaa can be any naturally occurring amino acid
XGFIYLVSVNGVTGPRENVNLRVKSLIQEIKKVTDKPVAVGFGISKPEHVKQIAGWGADGVIIGSAMVRQLGEAASPREGLKRLEAYARSMKNALP

SEQ ID NO: 883 - protein, 403 aa, Triticum aestivum
  misc_feature (31)..(31): Xaa can be any naturally occurring amino acid
  misc_feature (403)..(403): Xaa can be any naturally occurring amino acid
PPGAEEQGGSPGCGDRRWRSAPRRTGASATXSPLTNVIQSTFSANIGSRWGSLARAFSAKPLGNEVIGIDLGTTNSCVSVMEGKNAKVIENSEGTRTTPSVVAFSQKGERLVGTPAKRQAITNPQNTFFGTKRMIGRRFDDPQTQKEMKMVPYKIVKAPNGDAWVETNGKQYSPSQIGAFVLTKMKETAESYLGKSISKAVITVPAYFNDAQRQATKDAGRIAGLDVQRIINEPTAAALSYGTNNKEGLIAVFDLGGGTFDVSILEIPPGVFEVKATNGDTFLGGEDLGNTLLEYLVSEYKRSDNIDLSKDRLALQRLREAAEKAKIELSSTAQTEINLPFITADAAGAKHLNITLTRSKFESLVNGLIARTRDPCKNLLKDAGITTKGVDEGLLCGGMTRGX

SEQ ID NO: 884 - protein, 499 aa, Triticum aestivum
  misc_feature (453)..(453): Xaa can be any naturally occurring amino acid
MIGLPPATLPCLLCPPHHPTPLSHRVTPLPPPQPRPTGGAAAAAFKARFLTGPELRGGVGGEQQGRGRRSVAAGKMGRSASVFQALLVFLITIIETQWSSVSGMYCADMASTVYRPHSVTITEFGAVGDGVTLNTKAFQNAIFYLNSFADKGGAQLFVPAGRWLTGGFSLISHLTLSLDKDAVIIGSPHSSDWPVIDPLPSYGRGRELPGGRHQSLIFGSHLTDVIITGANGTIDGQGAIWWDWFRNNTLNYTRPHLVELMYSTNVVISNLTVKNSPFWNIHPVYCSQVIVEHFTILAPLDSPNTDGINPDSSTNVCISHCYVRNGDDVIVIKSGWDEYGISFARPSSNISISNITGETGGGAGIAIGSEMSGGISEVRAEGLRIVNSLHGIRIKTAPGRGGYVRNVYIANVSLHNVHMAIRINGNYGEHPDNNYGRNALPIINNIPIENVRXGVDVGVAGILEGIEGDNFSSICISNVYLRADSSVRRHRSARSVAVL

SEQ ID NO: 885 - protein, 427 aa, Triticum aestivum
  misc_feature (78)..(79): Xaa can be any naturally occurring amino acid
  misc_feature (427)..(427): Xaa can be any naturally occurring amino acid
MSSEPAPAPAPASASTEEIEADLSTATISKKQLKKDARKAEKAGKASQRQQQQQPQAEEADPFAANYGDVPVEEIQSXXVISGRTWTDIGDLDEAAAGRSVLIRGSAQTLRPVSKKMAFVVLRQSMSTVQCVLVASADAGVSTQMVRFATSLSKESIVDVEGVVTLPKEPLKATTQQVEIQVRKVYCINRAIPTLPINLEDAARSEAEFEKAEQNGEKLVRVLQDTRLNYRAIDLRTPANQAIFRIQCHVENKFREFLFSENFIGIHSPKLIGGSSEGGASVFKLEYNGQPACLAQSPQLYKQMSICGGFGRVFEVGPVFRAEKSNTHRHLCEFIGLDAEMEIKEHYFEVCDIIDGLFVAIFKHLNENCQKELETINRQYPFEPLKYLEKTLKLTYEEGIKMLKEAGTEIEPMGDLNTEAEKKLGRX

SEQ ID NO: 886 - protein, 139 aa, Triticum aestivum
  misc_feature (111)..(111): Xaa can be any naturally occurring amino acid
IRRPTGGNANDMLIFNDFIRTQSLVELPIKGRTYTWSNMQDDPLLVQLDWFFSSVHWSSSYPNTTVSPLGKPASDHVPFGIDLCIPKSKVFHFENYWIQHSGFHEIVQCSXSQPCHAANSAALICRKLKKLRYALKSWS

SEQ ID NO: 887 - protein, 505 aa, Triticum aestivum
  misc_feature (1)..(1): Xaa can be any naturally occurring amino acid
  misc_feature (4)..(4): Xaa can be any naturally occurring amino acid
  misc_feature (24)..(24): Xaa can be any naturally occurring amino acid
XPYXREQKLELHRGGGRSRTSGSXRAAGIRPHASEWYDILGVLSGSMTVLPNGTVIMIYTGATNASAVEVQCIATPADPTDPLLRRWTKHPANPVIWSPPGVGTKDFRDPMTAWYDESDDTWRTLLGSKDDHDGHHDGIAMMYKTKDFLNYELIPGILHRVERTGEWECIDFYPVGRRTSDNSSEMLHVLKASMDDERHDYYSLGTYDSAANTWTPIDPELDLGIGLRYDWGKFYASTSFYDPAKKRRVLMGYVGEVDSKRADVVKGWASIQSVPRTIALDEKTRTNLLLWPVEEIETLRLNATELSDVTLNTGSVIHIPLRQGTQLDIEATFHLDASAVAALNEADVGYNCSSSGGAVNRGALGPFGLLVLAAGDRRGEQTAVYFYVSRGLDGGLHTSFCQDELRSSRAKDVTKRVIGSTVPVLDGEAFSMRVLVDHSIVQGFAMGGRTTMTSRVYPMEAYQEAKVYLFNNATGASVTAERLVVHEMDSAHNQLSNMDDHSYVQ

SEQ ID NO: 888 - protein, 619 aa, Triticum aestivum
  misc_feature (328)..(329): Xaa can be any naturally occurring amino acid
  misc_feature (619)..(619): Xaa can be any naturally occurring amino acid
FCPKRVFETLASPTKTIKNMLTVPSSPSSPANGGSVKVVHMTPVTSAMTTAKWLREVISLLPEKPSSKLEKFLSSCDTDLTSDVTKRVSIILEAIFPTKPSGHWGGSMGLNCTNAFDIPWAEARKMEASKLYYRVLEAICRAESLNTNVNNLTPLLSNERFHRCLIACSAELVLATHKTVIMMFPAVLESTGLTAFDLSKIIENFVRHEESLPRELKRHLNSLEEQLLESMAWEKGSSLYNSLVVARPSLASEINRLGLLAESMPSLDDIVARQNFHAEDLPATPSKKRAAYSDENGDSRSPKRLCIEPRSTLVDQISQTPPAKQSYXXLKAKWRPLQSTFASPTVSNPVGGNEKCAEVGVHIFFSKILKLAAIRIRNLCERLRHVEQTERVYNIFKQILDQQTTLFFNRHIDQLILCSLYGVAKVSQLTLTFKEIVNNYRREQQCIPEVFRSVFVVNTNHNGGLGSRHVDIIVFYNEVFVPAVKPFLVALIPSGGAHPDNKKNPNSQIPGSPKPPPFSNLPDMSPKKVSSSHNVYISPLRQTKKDALLSPSSRSFYACIGESTHAYQSPSEDLAAINNCLNYTSRRINTRINFDMVSDSVVAGSLGQPNGVPASSDPX

SEQ ID NO: 889 - protein, 389 aa, Triticum aestivum
  misc_feature (1)..(1): Xaa can be any naturally occurring amino acid
XRALLRYPLRCTTVQEVEIKVRKLYCISRAAPKLPISVEDAGRSSAEFAKAEAKGVPLPCVGQDTRLDYRVIDVRTPTGQAIFRIQHQVENKFREHLSSKDFISIHTPKLISGSSEGGAAVFKLEYKNGKSACLAQSPQLHKQMAICGGFRRVFEVGPVFRAEDSNTHRHLCEFVGLDAEMEIMRHYFEVCDIVDGLFIQIFRHLNENCKRELEAINRQYPFEPLKYLERTLRLSYEEGIQMLKEAGTEIEPMADLNTEAEKKLGQLVREKYDTEFFILYRYPLAARPFYTMPCYENPAYSNSFDVFLRGEEIISGAQRIHEPELLAKRAAEHGIGKSSIKSYVDSFRYGAPPHGGFGVGLERVVMLFCGLSNVRLASLFPRDPQRLSP

SEQ ID NO: 890 - protein, 217 aa, Triticum aestivum
SARLSSSSGKNCSPKDSVGSGGGSVSQQLGSNFDGQNSSAGNDASTKELECQRIKTTAINDDSASQHGIPSTSIMHYPFISVDHQQLDMTNESYVLPTSSNSSSGSASLHLKNDRTEKELPLLVPFDNHIAQMNYSKTVISTLNAPKTSTDLPVKLHYDEQTSFEASDFQEYESHSVTGGTVAETANRVDESTVGGADKAAEAASPKKTRTTRKKKK

SEQ ID NO: 891 - protein, 353 aa, Triticum aestivum
  misc_feature (13)..(13): Xaa can be any naturally occurring amino acid
  misc_feature (19)..(19): Xaa can be any naturally occurring amino acid
  misc_feature (40)..(41): Xaa can be any naturally occurring amino acid
  misc_feature (346)..(346): Xaa can be any naturally occurring amino acid
CKAYPSINGDLHXVCLVCXLCLLSPLLPRRRPFGNPGYGXXLFPQFYDHSCPKAKEMVHSIVAQAVARETRMAASLVRLHFHDCFVKGCDASVLLDNSTNIVSEKGSNPNRNSIRGFEVVDQIKVALETACPGTVSCADILALAARDSTILVGGPFWDVPLGRRDSLGASIQGSNQGIPAPNNTLPTIITKFKRLGLNVVDVVALSGGHTIGLSRCTSFRQRLYNQSGNGLADGTLDVSYAAQLRQGCPRSGGDDNLFPLDIVSSTKFDNYYFKNILAGRGLLSSDEVLLTKSAETAALVKAYADDVHLFFQHFAQSMVNMGNITPLTGSKGEIRKNCRRLNNSHXVFGPPRL

SEQ ID NO: 892 - protein, 160 aa, Triticum aestivum
  misc_feature (160)..(160): Xaa can be any naturally occurring amino acid
AGTGIGLEFRESGLNLNGKNDRLIKEGMIFNVNLGLSNMQAETNNEKTKQFSLLLADTALVNDKAAEILTNCSKAVKDVAYSFNEDEEEVPKPKRAKVEPNGAEALPSKATLRSDNQEMSKEELRRQHQAELARQKNEETARRLAGGGSGNGDGRGPFRX

SEQ ID NO: 893 - protein, 231 aa, Triticum aestivum
  misc_feature (1)..(1): Xaa can be any naturally occurring amino acid
  misc_feature (231)..(231): Xaa can be any naturally occurring amino acid
XLNWEYLHFLHSTLEHLDAIFTQEELKKAVFDLTMLRNPPGPDGFIRGSFKKCWGLIKNDLLEAINQFFHLRGNTWKLLNNAFIVLLPKKGNVDRASDFRPISLMHSVAKILCKIMANRLAPELQHMISASQSAFLKGRSIQDNFLFVQNVIRRAFTRNSPLIFLKLDIAKAFDSVHWSYMLEVSKGFGFGQRWTDMIALLLSTSSSRVLLNGCPGMPFLHRRGLRQGDPX

SEQ ID NO: 894 - protein, 117 aa, Triticum aestivum
  misc_feature (1)..(1): Xaa can be any naturally occurring amino acid
  misc_feature (117)..(117): Xaa can be any naturally occurring amino acid
XAASTSSVAVLDTAAGVWCDTKSVVTTPRTGRYSADAAGGEASGELTRRCRHAAAAVGDMIFIYGGLRGGVLLDDLLAAEDLAAAETTSAANHAAAAAANMQAGGTPGRFACRRGRX

SEQ ID NO: 895 - protein, 249 aa, Triticum aestivum
  misc_feature (221)..(221): Xaa can be any naturally occurring amino acid
  misc_feature (249)..(249): Xaa can be any naturally occurring amino acid
QKCVVYPIRCELLDLSQILLPFGGSTGTLSCKYLGLPLSFSKPKRVDEQVLIDRIASKLSPWKGKQMTKIARLVLTNSVLMAIVTYFLTSLTLSSWAIKKIDKIRRDFFWTAEEEASGGKCMVNWRRICSPKEFGGLGIKNLECFGRALRLQWLWFKWDDNDMPWKGYATPCAGSDFALFDACTKISVGDGAKTLFWKDNWLNGSAPAKMAPTIFKRSRCXSISIKEGVQEGKMMRGLSRLNSEEDYSX

SEQ ID NO: 896 - protein, 479 aa, Triticum aestivum
  misc_feature (133)..(133): Xaa can be any naturally occurring amino acid
  misc_feature (144)..(145): Xaa can be any naturally occurring amino acid
  misc_feature (466)..(467): Xaa can be any naturally occurring amino acid
  misc_feature (471)..(471): Xaa can be any naturally occurring amino acid
  misc_feature (479)..(479): Xaa can be any naturally occurring amino acid
AITSSKPSFAFHFNFVPMEARDGGSAPLPCSYAPLPEDAEAAATVGRVRRTAGLLCAALLLATVAVLLVVAALAGVRLAGQLPAGGIVVMSGHQTTVDTAPMSASSRGPESGVSEKTSYAGEQAAGALGVGRXNAYPGNNAMLXXQRTGLSFPPDKNWMNDPNGPVYYKGWYHLFYQYNPERMLWGNKIAWGHAASRDLLRWRHLPVAMSPDQWYDINGVWSGSATVLPDGRIVMLYTGSTNASVQVQCLAFPTDPSDPLLINWTKYENNPVMYPPPGVGDKDFRDPTTAWFDGSDDTWRLVIGSKDDHHAGMVMTYKTKDFIDYELVPGLLHRVPGTGMWECIDLYPVGGVRGIDMTEAVAAASNNGGGDVLHVMKESSDDDRHDYYALGRYDAAMNTWTPLDSDADVGIGLRYDWGKFYASKTFYDPSKKRRVLWGWVGETDSEHADVAKGWASLQVLDIFIIXXSSDXLIPPLIDX

SEQ ID NO: 897 - protein, 509 aa, Triticum aestivum
GTRGHAVSRDLIHWRHLPLAMVPDQWYDINGVWTGSATVLPDGSLVILYTGSTNASVQVQCLAVPADPNDSLLRNWTKYEANPILVPPPGIGDKDFRDPTTAWFDESDKTWRTSSAPRDNHGHTGIVMTYKTKDFINYELIPGLLHSVPGTGMWECIDFYPVGGADGSEELYVMKESSDDDRHDWYALGRYDAAANKYTPIDAEMDVGIGLRYDWGKFYASKTFYDPSKNRRVLWGWIGETDSERADVAKGWASLQSIPRTVELDEKTRTNLIQWPVVEIETLRINSTDLGGTTIDTGSVLPLPLRRATQLDIEATFHLDTSAIAAVNEADVGYNCSTSGGAANRGALGPFGLLVLADGALKEQTAVYFYVSRGLDGGLQTHFCQDESRSSLAQDVVKRVVGFTVPVLDGEDLSLRVLVDHSIVESFAMGGRSTANIEGVSDGGHLRRRWRVPFQQRHRRCRHRGEARGARDGRLLQPDLHGRRCLSRLVAAINQALGPVMHIHPYYIL

SEQ ID NO: 898 - protein, 164 aa, Triticum aestivum
  misc_feature (4)..(4): Xaa can be any naturally occurring amino acid
  misc_feature (164)..(164): Xaa can be any naturally occurring amino acid
RPRXDLGLPDLKWLDMALRSRWLWLKHPGASNPWKEFNLQVTQESRVLFEGRSVVGNGEATLFWLDRWLDGDRLQYESPNLFASVQPRLKTNHTVAETNVRGLWIEDVGSDLSPEALQEFISVWTRLLFFEPTAGIRDMPCWSWKKKGIFSTRRLVDAAANSDX

SEQ ID NO: 899 - protein, 244 aa, Triticum aestivum
  misc_feature (1)..(1): Xaa can be any naturally occurring amino acid
  misc_feature (195)..(195): Xaa can be any naturally occurring amino acid
  misc_feature (225)..(226): Xaa can be any naturally occurring amino acid
  misc_feature (228)..(228): Xaa can be any naturally occurring amino acid
  misc_feature (233)..(233): Xaa can be any naturally occurring amino acid
XHTGLVKDGRRYFHNMTQLYNITPRIEHYGCMVDLLSRAGLLQEARQLIDDMPMQANAVVWGALLGGCKIHRDAELAEHALKQLVMLEPRNSGNYVMLSNIYSNSNRWEDAAKLRSDMKVKRVEKVRAYSWVEFSGKVHEFRVGDKSHPHMDQIYQKLDELGMEMKTMGYKPTTDVVMFDVEDEEKEHTLVYHSXEKLAIAFCLLTTQPGEVLRAPKTPGGSRLXXLXIHLIXRIIHREIMCRD

SEQ ID NO: 900 - protein, 608 aa, Triticum aestivum
  misc_feature (109)..(109): Xaa can be any naturally occurring amino acid
  misc_feature (158)..(158): Xaa can be any naturally occurring amino acid
  misc_feature (182)..(182): Xaa can be any naturally occurring amino acid
  misc_feature (200)..(200): Xaa can be any naturally occurring amino acid
  misc_feature (475)..(476): Xaa can be any naturally occurring amino acid
  misc_feature (554)..(554): Xaa can be any naturally occurring amino acid
MHATTSRPQSVPIPSPPVPSPAEHRCGVRPQAIVSIGELSQTPAGECGLAVTRPRRPAKTNRPLGGAARPVHRTGTPLAAGQRVARSDFSRGPYGKQKRWADDPLATMXTALGRLGTVSLIKKGTVYRSGIVKDGKPLLSREWSRLSFSAAYTLRVVXGQVSSSASMVKTLCYQVVAVYSLXEGLATKTIIAAACFATNXEQRLVRCCCENTAMLGERKNVNLPGVVVDLPTLTEKDKEDILQWGVPNKIDMIALSFVRKGSDLVEVRKVLGEHAKSIMLMSKVENQEGVANFDDILAQSDAFMVARGDLGMEIPVEKIFYAQKVMIFKCNIQGKPVVTATQMLESMIKSPRPTRAEATDVANAVLDGTDCVMLSGETAAGAYPELAVQTMAKICLQAESCVDYSAVFKSIMSSAPIPMSPLESLASSAVRTANSAKATLILVLTRGGTTARLVAKYRPSMPILSVVVPELKTVXXFDWICSDEGPARQSLIVRGVIPMLSAGTAKAFDSEATEEALRFAMKNAKEMGLCNAGDSIVALHRIGNASVIKLLTVXASGSEATMQHHFARGFSLLSFCEATHTHSFLLPRLRQCNLVKTLCYQVVAVYSL

SEQ ID NO: 901 - protein, 253 aa, Triticum aestivum
  misc_feature (1)..(1): Xaa can be any naturally occurring amino acid
  misc_feature (24)..(24): Xaa can be any naturally occurring amino acid
  misc_feature (28)..(29): Xaa can be any naturally occurring amino acid
XSAHACRSELENLEKKIKTCLRNXQSAXXADITNGLEFKFELCQAACQEGIQHLCETTAYKVTFFDLGHILWDTLYIGDIASSRVDLLLRELDPILETISGTVHIKVRNRAITALMKATFDGFLLVILAGGPLRAFTRQDSQIIEGDFRSLRDLFLADGDGLPEELVDKASSQVKNVLPLLRTESEGLIERFKRLIAESDQSRTASRGKLPMPTTTGHWSPNDANTVLRVLCYRHEEAATRFLKKTYGLPKKL

SEQ ID NO: 902 - protein, 247 aa, Triticum aestivum
  misc_feature (238)..(238): Xaa can be any naturally occurring amino acid
  misc_feature (247)..(247): Xaa can be any naturally occurring amino acid
MAMARRQHITIFTTASLPWMTGTAVNPLFRAAYLAKAGDWEVTLVVPWLSKGDQMLVYPNKMKFSGPAEQEGYVWRWLEERTGPLPRFNIIFYPGKFSTEKRSILPVGDITETISDEKADIAVLEEPEHLTWYHHGRRWKKKFRKVIGVVHTNYLEYVKREKNGYIQAFLLKHINSWVTDIYCHKVIRLSGATQEVPRSVICNVHGVNPKFIEIGKLKHQQISQREQSFFKGAYYIGXKMVWSKGYX

SEQ ID NO: 903 - protein, 200 aa, Triticum aestivum
QHSLTNLSTGGAGDLSRSSNAPVASGSPSNSVSKSTGGSPPASGSAKGGQPVVQLSSPQQHAAKNSPSTSGSKSASTNPYSSMPMPSILGQQPNMAHSGGKQQSHGPSLKQQQPFPQGHGHGHFFISNAFAPQGPPQHVNAGAGAGLYQKRSADKTQQQQQQQQQNAVSGSSAMLSLGSMSMSTSAIPADAGKAHSAAGQ

SEQ ID NO: 904 - protein, 475 aa, Triticum aestivum
MAGGFRVLHLVRPFLGFLPEVQSADRRIPFREKLIYTVISLFIFLVCSQLPLYGIHSTTGADPFYWLRAILASNRGTVMELGITPIVTSGMVMQLLVGSKIIEVDNSVREDRALLNGAQKLLGILIAIGEAVAYVLSGMYGSVSQLGTGNAIVIILQLFFAGIIVICLDELLQKGYGLGSGISLFIATNICENIIWKAFSPTTINSGRGAEFEGAVIALFHLLITRSDKVRALREAFYRQNLPNVTNLLATVLVFLIVIYFQGFRVVLPVRSKNARGQQGSYPIKLFYTSNMPIILHSALITNLYFISQLLYRKYSGNFLVNLLGIWKESEYSGHSIPVGGLAYYVTAPSSLADVVANPFHALFYVVFMLSACALFSKTWIEVSGSSAKDVAKQLKEQQMVMPGHRESNLQKELNRYIPTAAAFGGVCIGALTVLADFMGAIGSGTGILLAVTIIYQYFETFEKERATELGFFGF

SEQ ID NO: 905 - protein, 475 aa, Triticum aestivum
MAGGFRVLHLVRPFLAFLPEVQSADRKIPFREKVIYTVISLFIFLVCSQLPLYGIHSTTGADPFYWMRVILASNRGTVMELGITPIVTSGMVMQLLVGSKIIEVDNSVREDRALLNGAQKLLGILIAIGEAVAYVLSGMYGSVSQLGTGNAILIILQLFFAGIIVICLDELLQKGYGLGSGISLFIATNICENIIWKAFSPTTINSGRGAEFEGAVIALFHLLITRSDKVRALREAFYRQNLPNVTNLLATVLVFLIVIYFQGFRVVLPVRSKNARGQQGSYPIKLFYTSNMPIILHSALITNLYFISQLLYRKYSGNFLVNLLGIWKESEYSGHSIPVGGLAYYVTAPSSMADILANPFHALFYVVFMLSACALFSKTWIEVSGSSAKDVAKQLKEQQMVMPGHRESNLQKELNKYIPTAAAFGGVCIGALTVLADFMGAIGSGTGILLADSIIYQYFETFEKERATELGFFGF

SEQ ID NO: 906 - protein, 538 aa, Triticum aestivum
  misc_feature (155)..(155): Xaa can be any naturally occurring amino acid
MALNLTHQTGAAAIAATPAPGARASVFAAASPAAAAAAGSAVAPAQATSLRMQTQLVAAHPDAGGEEARKVGVPVFVMMPLDTVRKDGSALNRRKAVQASLAALKSAGTAGIMVDVWWGIAESEGPGQYNFAGYIELMEMAKKAGLKVQAVMSFXHQCGGNVGDSVNIPLPKWVTEEMDKDQDLAYTDRCGRRNYEYISLGADALPALKGRTPIQCYADFMRAFRDHLAPYMGNTICEIQVGMGPAGELRYPSYPESNGTWSFPGIGEFQCYDRYMRASLKAAAEAVGRPEWGNAGPEDSGSYNQWPEDTGFFRRDGGWNTDYGQFFMSWYSQMLIEHGERILSACSSVFTGTPGVKVSVKVAGIHWHYGTRSHAPELTAGYYNTRNHDGYLPIARMIGRHGAVLNFTCVEMRNHEQPQDAQCMPEALVSQVASAAKEAGVGLAGENALPRYDETAHDQVLATAAEKAEEDRMVAFTYLRMGPDLFQPDNWRRFAAFVKRMTETGVRDVSREQVEREAQGVAHATQGVIQEAAVALCN

SEQ ID NO: 907 - protein, 309 aa, Triticum aestivum
  misc_feature (1)..(1): Xaa can be any naturally occurring amino acid
XAPGQSAKLLEGEMLVLVDFTSYVEKSSDPGRYVLGDLEGPADPDPEPLQEHVQRVPPPLPDPSTPGGWVRYDPVPTPPPRQVTYAVLPQTGYFEFIPLEKATGEEKPVGLTEVEVGKIYEVVLTTFAGLYRYRLGDVVKIARFHNSTPELQFICRRSLVLSINIDKNTEKDLQLAVEEAAKLLEGEKLELVDFTSYVEKSSDPGRYVIFWELSSEATDDVLSGCANALDLAFLDAGYMGSRKIKTIGPLELRVLRKGTFREILLHFLTLGGAVSQFKTPRFVSPANGKVLQILNRNVAKSYFSTAYGL

SEQ ID NO: 908 - protein, 305 aa, Triticum aestivum
  misc_feature (1)..(1): Xaa can be any naturally occurring amino acid
XFPSSDSVLTSLMSQAVQPWIWHRLVAGLNAQLRLVRRGNLKATFLPVLNWLETHADPALGVNGVRVDLAWFQATALGYCQLGLVVYTVEGEPVTAELDGSPRIKIEQHSPITGGILDSTTLRTLKDRRDFLYPFSLILHNSKPVGHQDLVGLVISILLLADFSLVLLTFLQLYSYSMADVLLVLFVLPLAILSPFPAGINALFSHGPRRSAGLARVYALWNITSLVNVVVALICGFVHYKSSTKRHPSTQPWNLGTDESGWWLFPTGLMLLKCIQARLVDWHVGNLEIQDQAVYSKDPNIFWQS

SEQ ID NO: 909 - protein, 188 aa, Triticum aestivum
  misc_feature (1)..(1): Xaa can be any naturally occurring amino acid
  misc_feature (14)..(14): Xaa can be any naturally occurring amino acid
XNFGIDNSNNRFLXFAVDCGSRPIRGSDNSIYEPDDASLPVASYYVTDSTRWGVSNIGRFMDPSNGSYIIYTSRRFTNTLDSELFQTARMSPSSLRYFGIGLKNGMYSVVLQFAEIFFPDDQTWKSVGKRIFNIYIQGDLKETDFDIKKQTNGKSYTAVQRQYTVEVTNNFIDIHLFWAGKGTCCIPD

SEQ ID NO: 910 - protein, 324 aa, Triticum aestivum
  misc_feature (161)..(161): Xaa can be any naturally occurring amino acid
MAAKRELVVSFGEMLIDFVPTVAGVSLAEAPAFVKAPGGAPANVAIAVARLGGAAAFVGKLGDDEFGRMLANILRDNGVDAGGVVFDSGARTALAFVTLRADGEREFMFYRNPSADMLLTADELKVDVIKRAAVFHYGSISLIAEPCRTAHLHAMKVAKEXAGALLSYDPNLREALWPSLEEARTKILSIWDQADIVKVSEVELEFLTGINSVEDDVAMKLWRPTFKLMLVTLGDQGCKYYTKDFRGTVPSYKVQQVDTTGAGDAFIGSLLRKIVQDPSALQDKTKLEGAIKFANACGAITATKKGAIPSLPKEDEVLRLMEKA

SEQ ID NO: 911 - protein, 92 aa, Triticum aestivum
  misc_feature (92)..(92): Xaa can be any naturally occurring amino acid
RPRLGDRPYAEKYKLKFMKAKAVFEAKLWNGSYFNYDSGSSSISRTIQADQFAGQWYAVSSGLFLIFDDHKIKSALQKIFELLFIKVKCGTX

SEQ ID NO: 912 - protein, 120 aa, Triticum aestivum
  misc_feature (120)..(120): Xaa can be any naturally occurring amino acid
PGRRAGVVIGSGMGGITALSDGIASLVTKGCGKISPLCIPHAITNISSALVAMDAADGFLGPNFSISTACATSNHCFNSAADQIRLGRADVMIAGGTEAGIIPIALGAFFACRALSQRNX

SEQ ID NO: 913 - protein, 110 aa, Triticum aestivum
  misc_feature (1)..(1): Xaa can be any naturally occurring amino acid
  misc_feature (110)..(110): Xaa can be any naturally occurring amino acid
XRRAAICAAMDYMDQFDRDSEGMIANDGSADQTYYAWTVHGIIAYCGALCLAALQPDATMRHRLGDRTFAEKSKLKFMKANAVYEAKLQTGFYFTYDSDTSDDSRSIHAX

SEQ ID NO: 914 - protein, 107 aa, Triticum aestivum
MAKLHFFLLLLLAAAQATHGEDGAYIGVNIGTAMSSVPAATQITTLLRSQNIRHIRLYDADPGMLSALANTGIRVIISVPNEQLLAIGNSNATAAKWVARNVAAHYP

SEQ ID NO: 915 - protein, 471 aa, Triticum aestivum
  misc_feature (27)..(28): Xaa can be any naturally occurring amino acid
  misc_feature (31)..(31): Xaa can be any naturally occurring amino acid
  misc_feature (400)..(400): Xaa can be any naturally occurring amino acid
  misc_feature (417)..(417): Xaa can be any naturally occurring amino acid
RPGLQQVKKCIEIGLECVEIDRLKSGXXMNXPNIVKLKEVIRENDILYFIMEYMECNLYQLMKDRVKPFAESDVRNWCFQIFQALAYMHQRGYFHRDLKPENLLVSKDVLKLADFGLAREVSSAPPYTEYVSTRWYRAPEVLLQSSAYDSAVDMWAMGAIMAELLTLHPLFPGTSEADEILKICNVIGCPDEQTWPQGLSLAEAMKYQFPQIRGSQLSEVMKSASSEAVDLISSLCSWDPCKRPKAAEVLQHAFFKDCTYVPAAVRPKAAAPKTPPGVGARGVSGHIARRYSTGALSTSKPAANISIKPSSLSKIGVQRKLQLDRQAPQKSTRPTESNTKQTTSRVPARNSPGNANPILRHSRSLPETGRATVQKVSSITEKLAHMSVTSRTRTAVKPPXPAVEGWASQVRLPREIXRNPSGKEIDKKVGELKEYRVKNRSAAAARRVGYRAKTRFASAPTVCFACSWSLR

SEQ ID NO: 916 - protein, 202 aa, Triticum aestivum
  misc_feature (202)..(202): Xaa can be any naturally occurring amino acid
MATSMVCLVALCLVSPLLLAGAVVGNPGYGGLFPQFYDHSCPKAKEIVHSMVAQAVARETRMAASLVRLHFHDCFVKGCDASVLLDNSTNIVSEKGSNPNKNSIKGFEVVDEIKVALETACPGTVSCADILALAARDSTILVGGPYWEVPLGRRDSLGASIQGSNNDIPAPNNTLPTIITKFKRLGLNVVDVVALSSGHTIX

SEQ ID NO: 917 - protein, 192 aa, Triticum aestivum
  misc_feature (1)..(1): Xaa can be any naturally occurring amino acid
  misc_feature (5)..(5): Xaa can be any naturally occurring amino acid
  misc_feature (128)..(128): Xaa can be any naturally occurring amino acid
  misc_feature (192)..(192): Xaa can be any naturally occurring amino acid
XSPHXKNSCYAHYFGNWRTHADCSPFQRLSVYADDVILFIKPTVADLSFTTMALQMFGEASGLHVNFPKSSAIMIHADETDTERVSHALPWRMDSSPCKYLGLMLSIKQLTRSDWQPVVDDVLNFLPXWQRGMVTRPGRLTLVNTVIRARPTHHLLVADAPKWDLERVDKSCRAFFWAGTEHIHGGKCLVAX

SEQ ID NO: 918 - protein, 229 aa, Triticum aestivum
  misc_feature (1)..(1): Xaa can be any naturally occurring amino acid
  misc_feature (229)..(229): Xaa can be any naturally occurring amino acid
XFYDDTALPKLVADFASLELSPVDGRTMTDFMHTRGLNMCSLGRLVELGEKLPHIQSICIHEMVIRAFKHVIRAVIAAVDDMQNMSAVIAETLNILLGSPRLENDLDTDANEHNLRLKWVESFLSKRYCWTLKDEFAHLRKPIILRGLCSKVGLELVARDYDMNSPNPFDKSDIVNIVPICKHVVYSSIDSRNLLESSKMALDKGKLDDAVNYGSKALSKVIAVCGPYX

SEQ ID NO: 919 - protein, 453 aa, Triticum aestivum
  misc_feature (37)..(37): Xaa can be any naturally occurring amino acid
  misc_feature (351)..(351): Xaa can be any naturally occurring amino acid
  misc_feature (353)..(353): Xaa can be any naturally occurring amino acid
  misc_feature (369)..(370): Xaa can be any naturally occurring amino acid
RSEITFRSKDPRHSSEVVQQIRTLRRQVASRESERAXEWATLVTQEKLQQASNKTKQMRLNDVWIRPPFGGRGRKLTGTLEAHVNGFRYSTSRADERVDIMYGNIKHAFFQPAEKEMITLLHFHLHNHIMVGNKKTKDVQFYVEVMDVVQTVGGSRRSALDPDEIEEEQRERDRKNRINMEFQNYINKVNDHWSQPQFKGLDLEFDIPLRELGFHGVPYKASAFIIPTSTCLVELIETPFLVVTLGEIEIVNLERVGFGTKNFDMAIVFKDFKKDVLRIDSIPSTSLDAIKEWLDTTDLKYYESRLNLNWRPILKTIIDDPQKFVDDGGWEFLNMEASDSDTRFCSSFARXGXEPSDAEPESESVCCYXXLACVTESQDVVVVGVSAGGSVGGVGVAGVLLGREATNADRDHGAESDSEEERRRRKVKTFSKSGAPPQLSSKGGPPSKKPKFR

SEQ ID NO: 920 - protein, 321 aa, Triticum aestivum
  misc_feature (2)..(2): Xaa can be any naturally occurring amino acid
  misc_feature (22)..(22): Xaa can be any naturally occurring amino acid
  misc_feature (107)..(107): Xaa can be any naturally occurring amino acid
  misc_feature (112)..(112): Xaa can be any naturally occurring amino acid
  misc_feature (229)..(229): Xaa can be any naturally occurring amino acid
  misc_feature (258)..(258): Xaa can be any naturally occurring amino acid
KXNGGLGIKNIECFSRALRLRXGVFKWQDEERPWKGSATPCDDTDRQLFSSCTTICLGDGSIASFWMNKWLNGNSPSVLAPDVFKLAGFKRVTVKEGLRNGKWMQGXAAIGXTEKQLNQFVHLWHEVQMINLSVKRDTAIWNLTTSAAYSACSAYDAQFCARTGLARVWKSKMEGKVKFYIWLLLQNRNWTADCLQARGWPNNDQCKLCDQEAETASHIALKCSYAREXLLPFSAAKQCGVDYYYMAQSVSEWWDQCXALSGKREKKPRSLGAYIVWNLWKERNRRVFEHKELTTLALTRLIRDDIRCFNEATRGTAVPGE

SEQ ID NO: 921 - protein, 610 aa, Triticum aestivum
MATMGSLIGLVNRIQQACTVLGDHGGGAGGSLWEALPSVAVVGGQSSGKSSVLESIVGRDFLPRGSGIVTRRPLVLQLHKTEGGQEYAEFLHAPRKRFSDFAAVRKEIADETDRMTGKSKAISNVPIHLSIYSPHVVNLTLIDLPGLTKVAVEGQPESIVQDIENMVRTYVDKPNSIILAISPANQDIATSDAIKLAKEVDPTGERTFGVVTKLDLMDKGTNAIDVLEGRSYRLQHPWVGIVNRSQADINKNVDMLAARRKEQEYFQSSPDYGHLAHKMGAEYLAKLLSQHLEAVIKAKIPSIISMINKTVDEIEAELDRLGRPIGGDAGAQLYTILDMCRAFDRVFKEHLDGGRPGGDRIYGVFDHQLPAALKKLPFDKHLSLQNVRKVISEADGYQPHLIAPEQGYRRLIDSSLSYFRGPAEASVDAVHLVLKELVRRSIAATEELKRFPTLQSDIAAAANESLERFREDGRKTVIRLVDMEASYLTVEFFRKLPTEPDKGANNNTPANDRYQDNHLRRIGSNVSSYINMVCDTLRNTIPKAVVHCQVKEAKRNLLNRFYAHVGSKEKKQLSAMLDEDPALMEKRDSLVKKLELYKSARNEIDSVAWK

SEQ ID NO: 922 - protein, 659 aa, Triticum aestivum
  misc_feature (64)..(65): Xaa can be any naturally occurring amino acid
  misc_feature (177)..(177): Xaa can be any naturally occurring amino acid
  misc_feature (192)..(192): Xaa can be any naturally occurring amino acid
  misc_feature (594)..(594): Xaa can be any naturally occurring amino acid
PLPPVPPPPPPPPLAPAPHRPPRRPRLPPTGGAAPAGTPRRAPVGSVIGRVNRVKRASTVLREXXGAGSGDPCGGAGPSVAGAGGRGSGSWSGLAGIVARGSRPPGSGVMTRRPAVLPLQKTEGEQEYTEFLHAPRKRLSDLAAVRKEIADVTDGIAEKSKAISNDPIHLSIYSPHXVVNLTLIDLPGLTKXVAVEGQPESIVQDIENMVRTYVDKPNSIILAISPANQDIATSDAIKLAKEVDPTGERTFGVVTKLDLMDKGTNAIDVLEGRSYRLQHPWVGIVNRSQADINKNVDMLAARRKEQEYFQSSPDYGHLAHKMGAEYLAKLLSQHLEAVIKAKIPSIISMINKTVDEIEAELDRLGRPIGGDAGAQLYTILDMCRAFDRVFKEHLDGGRPGGDRIYGVFDHQLPAALKKLPFDKHLSLQNVRKVISEADGYQPHLIAPEQGYRRLIDSSLSYFRGPAEASVDAVHLVLKELVRRSIAATEELKRFPTLQSDIAAAANESLERFREDGRKTVIRLVDMEASYLTVDFFRKLPTDPDKGANNNTPANDRYQDNHYRRIGSNVSSYINMVCDTLRNTIPKAVEFRKPXVHCKETCSKRTMLNRFYAHVGSKEKKQLSAMLDEDPALMEKRDSLVKKLELYKSARNEIDSVAWK

SEQ ID NO: 923 - protein, 271 aa, Triticum aestivum
MMSMMADLSCGASGVTVNDHQLAAPAPEDSAVAGSEKMGRGRIEIKRIENTTNRQVTFCKRRNGLLKKAYELSVLCDAEVALIVFSSRGRLYEYSNNSVKATIERYKKANSDTSNSGTVAEVNAQYYQQESSKLRQQISSLQNSNSRSLVRDSVSTMTLRDLKQLEGRLEKGIAKIRARKNELMYAEVEYMQKREMELHNDNIYLRSKVSENERGQQPMNMMASGSTSSEYDHMVPPFDSRNFLQANMQQQQHYSQQLQPTALQLGQQYFN

SEQ ID NO: 924 - protein, 148 aa, Triticum aestivum
  misc_feature (148)..(148): Xaa can be any naturally occurring amino acid
MATSMVCLVALCLVSPLLLAGAVHGNPGYGGLFPQFYDHSCPKAKEIVHSMVAQAVARETRMAASLVRLHFHDCFVKGCDASVLLDNSTNIISEKGSNPNKNSLRGFEVVDQIKAALEAACPGTVSCADILALAARDSTILVGGPFWX

SEQ ID NO: 925 - protein, 259 aa, Triticum aestivum
MAASAARSLALFSSAASLGLGRASSRLALSSPPSHSGLLPRPALAFRGRASFAATAVVMGKAGAVDAEADAGMDAVQRRLMFDDECILVDEQDNVIGHESKYNCHLMEKIESGHALHRAFSVFLFNSKYELLLQQRSTTKVTFPLVWTNTCCSHPLHRESELIEENCQGVRNAAQRKLFDELGIQAEDLPVDQFIPLGKMLYKAPSDGKWGEHELDYLLFMVRDVKLNPNPEEVSDVKYVNRDELKQLIKKADDGEGGI

SEQ ID NO: 926 - protein, 256 aa, Triticum aestivum
  misc_feature (1)..(1): Xaa can be any naturally occurring amino acid
XRKRPSTDFLETIQKDVNPSMRAILIDWLVEVAEEYRLVPDTLYLTVNYIDRYLSGNEINRQRLQLLGVACMLIAAKYEEICAPQVEEFCYITDNTYFKDEVLDMEASVLNYLKFEMTAPTAKCFLRRFVRAAQVCDEDPPLHLEFLANYVAELSLLEYSLLAYPPSLVAASAIFLSKFILQPAKHPWNSTLAHYTQYKPSELCDCVKALHRLFSVGPGSNLPAIREKYSQHKYKFVGKKQCPTSVPAEFFRDAAC

SEQ ID NO: 927 - protein, 144 aa, Triticum aestivum
  misc_feature (1)..(1): Xaa can be any naturally occurring amino acid
  misc_feature (143)..(143): Xaa can be any naturally occurring amino acid
XGGTRPPTRPRTRGQQEKINEVRKQREEPSSLAIQGFLSDASILRFLRARNWNVQKSSKMLKSAVKWRAAYKPEMISWEEIALEAETGKIYRADYKDKLGRTVLVLRPGLQNTTSGKEQIKYLVYSLEKAIMNLTDDQEKMVXW

SEQ ID NO: 928 - protein, 405 aa, Triticum aestivum
  misc_feature (129)..(129): Xaa can be any naturally occurring amino acid
  misc_feature (190)..(190): Xaa can be any naturally occurring amino acid
  misc_feature (200)..(200): Xaa can be any naturally occurring amino acid
  misc_feature (209)..(210): Xaa can be any naturally occurring amino acid
  misc_feature (220)..(220): Xaa can be any naturally occurring amino acid
  misc_feature (224)..(224): Xaa can be any naturally occurring amino acid
  misc_feature (226)..(226): Xaa can be any naturally occurring amino acid
MDTSLAAAAVTAEASAPAAASTEPSAAPDASPAASSSSAAGAGAEDLAGGVAALSLDERFDLLMSIGEECIQPDELKRLLQNKPVPICYDGFEPSGRMHIAQGVVKTINVNKMIRAGCKVKIWIADWFXAQLNNKMGGDLKKIQTVGRYMIEIWKAAGMNLDGVEFLWSSEEISRRANEYWPLVMDIALXLNIIRNWRDXCCSLYDACXXFNWTLRCLAXHCSXHXGKRIMKADICQLGMDQRKVNMLAREYCDDIKRKNKPIILSHHMLPGFKEGQEKMSKSDPTSAIFMEDDEAQVNLKIKQAFCPPKIVDKNPCLEYIQYIVFPWFDKFEVVRKENNGGNKTFLTMDELVADYEAGDLHPADVKPALAKAINEILKPVRDHFNSSSEAKILLNTVKKYRVSN

SEQ ID NO: 929 - protein, 199 aa, Triticum aestivum
  misc_feature (1)..(1): Xaa can be any naturally occurring amino acid
  misc_feature (150)..(151): Xaa can be any naturally occurring amino acid
XTHASDFLLSWYAKACGLSSIVDKDKSQSALEKIYTFNVMKFKDGNRGAINGMWPDGTLDMSTMQSREIWPGVTYALAASMIQEGMVEEGFKTAEGVYHAAWSSEGLGYAFQTPESWNNDDEYRSLCYMRPLAIWAIQWALSNPKLHKEXXQTDITQDSFPKNQFSYARIAKLLQLPEDESSKSVPRVIYEIVRNRFTS

SEQ ID NO: 930 - protein, 295 aa, Triticum aestivum
  misc_feature (1)..(1): Xaa can be any naturally occurring amino acid
XISLFIATNICENIIWKAFSPTTINSGRGAEFEGAVIGLFHLLITRTDKVRALREAFYRQNLPNVTNLLATVLVFLIVIYFQGFRVVLPVRSRNARGQQGSYPIKPAASANLPIILHSALITNLYFISQLLYKKFSGNFLVNLLGIWKESEYSGHSIPVGGLAYYVTAPSSLADVVANPFHALFYVVFMLSACALFSKTWIEVSGSSARDVARQLKEQQMVMPGHRESNLERELNRYIPTAAAFGGVCIGALTVLADFMGAIGSGTGILLAVTIIYQYFETFEKERATELGFFGF

SEQ ID NO: 931 - protein, 119 aa, Triticum aestivum
  misc_feature (1)..(1): Xaa can be any naturally occurring amino acid
  misc_feature (77)..(77): Xaa can be any naturally occurring amino acid
XAIAFTFTCMQPVNAYLRPHRAENEEILSRNRIIWEYLHTYTGRTALVAAVTALFTGLQHLGHRLSEKEMAPMASRXKFVLGNPEEDDSVDLLQSGRFASKIDSSSPGSMEVQLEPLKG

SEQ ID NO: 932 - protein, 54 aa, Triticum aestivum
  misc_feature (1)..(1): Xaa can be any naturally occurring amino acid
  misc_feature (30)..(30): Xaa can be any naturally occurring amino acid
XYFNYDSGTSSNSQSIQADHLAGQWYTLLXGLPPIFDEHKIRSALQKIFEFNVM

SEQ ID NO: 933 - protein, 231 aa, Triticum aestivum
  misc_feature (1)..(1): Xaa can be any naturally occurring amino acid
  misc_feature (34)..(34): Xaa can be any naturally occurring amino acid
  misc_feature (40)..(40): Xaa can be any naturally occurring amino acid
  misc_feature (57)..(58): Xaa can be any naturally occurring amino acid
  misc_feature (231)..(231): Xaa can be any naturally occurring amino acid
XSADAWVNLQNLRSGSFPKNPACPARAIPPLRPXSAPPLXRTASHGDLHRFSQRGGXXSQHSQVEKRWVLADFDVGKALGRGKFGHVYLAREKRSCQIVALKVLFMSQLKQSQVEHQLRREVEIQSHLRHPNILRLYGYFYDQTRVYLILEHAAKGELYKELQRCKHFSERRSATYIASLARALIYLHGKHVIHRDIKPENLLVGVQGELKIADFGWSVHTFNRRRTMCGX

SEQ ID NO: 934 - protein, 771 aa, Triticum aestivum
MAADPSAAAAPADPDGPDAVRFTWNAWPRSKVEASRCVVPLAVAISPVRSPESLASPPLPYPPLRCKPPCSALLNPFARVDFAAKIWICPLCFSRNHFPPHYAGISENNVPAELFTQCSTVEYLVAGPPGSPAPLPPVFLFVIDTCVIEEELEYVKLSMRKAVALLPEHALVGLVTFGTQVHLHARGSAAPCPPYVFRGSKEISKEQILDQLGLSGGGRPGFPKMTQQPGVTTGVNRFLLPVSECECTLSTLLDELQPDQWPVEAGNRAIRCTGVALNVAAGLLGACVPGTGARIIALLGGPCTEGPGVIVSKDLSEPVRSHKDLDKDAAPHFQKAVKFYDGLAKQLVSQGHVLDVFASALDQVGLAEMKLAIERTGGLVVLSESFGHSVFKDSFKRIFEGGEHSLGLSFNGTFEINCSKDIKVQGVIGPCTSLEKKGALCADTIVGQGNTTAWKMCGLDRNTSLTVFFDVSPSGSGQPGHQNPDLYIQFVTSYQHPEGQMRIRATTVSRKWVDGSTNTEELVEGFDQETAAVVLARYISLKMEIEEEFDATRWLDRSLIRLCSRFGDYRKDDPSSFSLHSNFSLFPQFMFNLRRSQFVQVFNNSPDETAYFRMLLNRESITNSVAMIQPSLISFSFDSPPSPVFLDVASIAVDRILLLDAYFSVVIFHGMTIAQWRNMCYQNQPEHQQFAQLLQAPQEEAQVIINGRFPVPRLVVCDQHGSQARFLLAKLNPSATYNSAHDVPPGSDIIFTDDVSFQVFCEHLQRLAVQS

SEQ ID NO: 935 - protein, 169 aa, Triticum aestivum
  misc_feature (13)..(13): Xaa can be any naturally occurring amino acid
MGRSPCCDENGLXRRGPWTPEEDQKLTTDYIEKHGHGSWRALPKLAGLNRCGKSCRLRWTNYLRPDIKRGKFTPEEEQTILQLHSVLGNKWSAIAKHLPGRTDYEIKNFWNTHLKKKLIQMGFDPMTHRPRTDFFAALPQLIALANLRQLVEQRPWDDQSASQLQADAV

SEQ ID NO: 936 - protein, 261 aa, Triticum aestivum
MATSMSCLLVLCLVCPLLAGVVRANPWYGLFPQFYDHSCPKAKEIVQSIVAQAVAQETRMAASLVRLHFHDCFVKGCDASVLLDNSSSIISEKGSNPNLNSLRGFEVVDQIKVALETACPGTVSCADILALAARDSTVLVGGPYWDVPLGRRDSLGASIQGSNNDIPAPNNTLPTIITKFNRLGLNIVDVVALSGGHTIGLSRCTSFRQRLYNQSDNGLADSTLDMSYAAQLRQGCPRSGGDNNLFPLDVVSSTKFDNFYF

SEQ ID NO: 937 - protein, 45 aa, Triticum aestivum
GTTHVPPTRQWGPADPNTILRVLCHRDDEAANQFLKRTFQLAKRR

SEQ ID NO: 938 - protein, 152 aa, Triticum aestivum
  misc_feature (1)..(1): Xaa can be any naturally occurring amino acid
  misc_feature (88)..(88): Xaa can be any naturally occurring amino acid
  misc_feature (152)..(152): Xaa can be any naturally occurring amino acid
XAFLFSSMKSKFVAIGCPDLAYFVDDGGYYVTGCMSVCRPSERALPGSCRGDDGCCQSNIPLGLASYRPHLRSFGRRQQPGRDVPGQXSTGCAYAFMVDAWWFWYAGSHFNRTGDFAVPVVLDWAIRGAGAGASCAALRENATAYACRSAHX

SEQ ID NO: 939 - protein, 250 aa, Triticum aestivum
NPDSAIWGNKIAWGHAASRDLVRWRHLPVATSPDQWYDINGVWSGSATVLPDGRIVMLYTGSTNASVQVQCLAFPTDPSDPLLINWTKYENNPVMYPPPGVGEKDFRDPTTAWFDGSDDTWRLVIGSKDDRHAGMVMTYKTNDFINYELVPGLLHRLPGTGMWECIDLYPVGGKRGIDMTEVVAAASTNGGDDVLHVMKESSDDDRHDYYALGRYDAAKNTWTPLDADADVGIGLRYDWGKFYASKTFFD

SEQ ID NO: 940 - protein, 258 aa, Triticum aestivum
  misc_feature (177)..(177): Xaa can be any naturally occurring amino acid
LKQLQNGEAAFTKGAYYIGKMVWSKGYRELLDLLSKYQSRLGDLEVDLYGSGEDSDEIRESAERLSLAVNVHPGRDHADPLFHDYKVFINPSTTDVVCTTSAEALAMGKIVICANHPSNEFFKQFPNCRIYNNDEEFVQLTLNALAEQPTPLTDMQMYDLSWEAATDRFMEAAEMNXSYSRAKNPASVQDILPYFSSKLKQSLEDASVYLHQALSGLEVTRCAFGAVPKTLQPDEQLRKDLGLASPPKRKKQKQKLMT

SEQ ID NO: 941 - protein, 347 aa, Triticum aestivum
  misc_feature (333)..(333): Xaa can be any naturally occurring amino acid
MSAANRSQPIKLNRPVVGKARKLKDLMLKSDNRVCADCSAPDPKWASSNIGVFLCLKCGDVHRALGQDISNVLSLTLDDWSDSDIDSMIEVGGNSYANSIYEAFLPKDHPKPKPDSPMEYRTKFIRAKYETQDFLKPSLRISSKAGLESTNSLNSVDNSFSSTSRKHAPEDTREFVGQLNVTVVKGSGLAVRDMLTSDPYVVLSLGEQKAQTTVKASDLNPVWNEVLNLSVPRNYGPLKLEVYDHDTFSADDIMGEAEIDLKPMITAAMAFGDPSRHADMQIGRWFMTRDNCLLSDSIVNISSGKVKQEVYLKLQNVESGEMELELEWARLDXISLAVSLSKLTQKA

SEQ ID NO: 942 - protein, 169 aa, Triticum aestivum
  misc_feature (169)..(169): Xaa can be any naturally occurring amino acid
SAHASVIKEVGDGTFGSVWRAINKQNGEVVAVKKMKRKYYSFEECMSLREVKSLRRMNHPNIVKLKEVIRENDILYFIMEYMECNLYQLMKDRVKPFAESDVRNWCFQIFQAPAYMPQRGYFHRDLKPENLLVSKDVPKLADFGLAGEVSSAPPFTEYGLTRLYPTPEX

SEQ ID NO: 943 - protein, 103 aa, Triticum aestivum
  misc_feature (64)..(64): Xaa can be any naturally occurring amino acid
RLVSGKAVASCAGTKKLPSIGSAEHEPNDKDVHTNGCKIFGISLTQKVRVCDEVECSSANCDFXLQPLKPQMSKSLGNSCATVHEQRPAVGMVVDLSAVDTMI

SEQ ID NO: 944 - protein, 111 aa, Triticum aestivum
  misc_feature (1)..(1): Xaa can be any naturally occurring amino acid
  misc_feature (15)..(15): Xaa can be any naturally occurring amino acid
  misc_feature (17)..(17): Xaa can be any naturally occurring amino acid
XSHVQQPFQVVVPRXMXPFLPSKPTPATLTWQGRSWEMRFTGGRHIQRLEAGWRGFALDNALKLGDGCVFELVGCDGEGIVFRVQVLRAEIPASIRERAGGYTPSSAIVLD

SEQ ID NO: 945 - protein, 671 aa, Triticum aestivum
  misc_feature (87)..(87): Xaa can be any naturally occurring amino acid
  misc_feature (131)..(131): Xaa can be any naturally occurring amino acid
  misc_feature (153)..(153): Xaa can be any naturally occurring amino acid
  misc_feature (162)..(162): Xaa can be any naturally occurring amino acid
  misc_feature (179)..(179): Xaa can be any naturally occurring amino acid
  misc_feature (219)..(220): Xaa can be any naturally occurring amino acid
  misc_feature (228)..(228): Xaa can be any naturally occurring amino acid
IRFAPSSSGLQAASPAQIVRDSSPPFSPHRCAIPSDAAPADDPTTPAAMAHGDRMTTFEEGERESEYGYVRKVSGPVVVADGMGGAXAMYELVRVGHDSLIGEIIRLEGDSATIQVYEETAGLTVNDPVLXTKKPLSCELGCVILWNVFNHLXRYWEASETXWGNLYIPRDNSLPGLAXERKCDAEGNKINYADCTSLMGNRFYGLVFHDPVAAHLVLXXQTSGTVSXTETSGSGIMETRISELELKERVCVLTVLLIRTAQASLRVAANITLDTPNLRRHDLLVPIPSPVFGGTCAIPGAFGIVKTVISQALSKYSNSDTVVYVGCGERGNEMAEVLMDFPQLTMTLPDGREESVMKRTTLVANTSNMPVAAREASIYTGITIAEYFRDMGYNVSMMADSTSRWAEALREISGRLAEMPADSGYPAYLASRLASFYERAGKVQCLGSPDRTGSVTIVGAVSPPGGDFSDPVTSATLSIVQVFWGLDKKLAQRKHFPSVNWLISYSKYSTALEGYYEKFDPGFIDMRTKAREVLQREDDLNEIVQLVGKDALGESDKITLETAKLLREDYLAQNAFTPYDKYCPFYKSVWMMRNIIHFNTLANQAVERAANADGHKITYAVIKSRMGDLFYRLVSQKFEDPAEGEDALIAKFQKLYDDLTTGFRNLEDEAR

SEQ ID NO: 946 - protein, 145 aa, Triticum aestivum
  misc_feature (5)..(5): Xaa can be any naturally occurring amino acid
  misc_feature (15)..(15): Xaa can be any naturally occurring amino acid
  misc_feature (67)..(67): Xaa can be any naturally occurring amino acid
  misc_feature (145)..(145): Xaa can be any naturally occurring amino acid
YTWNXEGLRLYPTRXASIDHFCSPGCRKIYKRLKKLLGFKNNMEAGFSWSLVRCFAESEAAPSEKEXAEFVYCNSKTAVAFSVMNECFLPRIDERSGINIIHNVVYDCGSDFNRLNFSDFYTFILERGEEVISAATVRIHGTELX

SEQ ID NO: 947 - protein, 332 aa, Triticum aestivum
PKPHPTYLPTPFPLAAAAAAAARRFAAARGHSAPPTPPRRAGLDPERDTGMSAMMGARLDLAPFLLSPSPSPSRPSPALRLRTSSPAAAAARTRSLAPRAAAAATAVSAKPAAAAPLSADRSVVRLGLPSKGRMAELTLSLLKSCQLSVRQLNPRQYTADIPQVPNLEVWFQRPTDIVRKLCSGDLDLGIVGYDIISEYAQGNDDLVIIHDALDFGHCRLSLAVPKEGIFDSINTLEDLLNMPQWTEERPMRVVTGFGYVGAKFLKEKGFKHVSFLAGDGALESYPAMGMADAIVDLVSSGTTLRENNLKEIEGGVILESQATLVASKKSLN

SEQ ID NO: 948 - protein, 145 aa, Triticum aestivum
  misc_feature (1)..(1): Xaa can be any naturally occurring amino acid
  misc_feature (145)..(145): Xaa can be any naturally occurring amino acid
XARGKAGEVVPAYVWAPEEDGPYYPGRVSRWWLSQSLKHLDASLRRLGATHLFFNHLYDPLSLVRDHRVKQVLGAEGITVQSFNSDLLYEPWEVLDDHGCPFTMFTPFWNKCLCMVDPPAPMLPPKRINSGLCTARCCSSDHLIX

SEQ ID NO: 949 - protein, 153 aa, Triticum aestivum
  misc_feature (1)..(1): Xaa can be any naturally occurring amino acid
  misc_feature (96)..(97): Xaa can be any naturally occurring amino acid
XAVNGMRPDGTIDMSSTQSKEIWPGTTYAVAAAMIHEGMLEAAFRTAKGAHDASWSKDGFGYAFQTPEAWTAEGGYRGLHYMRPLSIWAMQWALSXXPELHKDLGPVASPGVASVGQDKFEKVASMLRLREEEQHKGFLRALYHILRQVVLPA

SEQ ID NO: 950 - protein, 495 aa, Triticum aestivum
  misc_feature (9)..(9): Xaa can be any naturally occurring amino acid
  misc_feature (11)..(11): Xaa can be any naturally occurring amino acid
  misc_feature (61)..(62): Xaa can be any naturally occurring amino acid
  misc_feature (265)..(266): Xaa can be any naturally occurring amino acid
PQPAHHTSXEXLPPPRLVSIATTPPTAAARSHAEPPRPHRRGLRGAVVGVAPPAGPRLRPXXAPAPAAAPAPPRRETDPKKRVVITGMGLVSVFGNHVDAYYDRLLAGESGVGPIDRFDASKFPTRFAGQIRGFSSEGYIDGKNDRRLDDCLRYCIVSGKKALESAGLALGSDAMGKIDKARAGVLVGTGMGGLQVFSDGVQNLLEKGYRKITPFFIPYAITNMGSALLGMDIGFMGPNYSISTACATSNYCFYAAANHIRKGEXXVMIAGGTEAAIIPIGVGGFVACRALSQRNDDPKTASRPWDKERDGFVMGEGAGVLVMESLEHAMKRGAPIVAEYLGGAVNCDAYHMTDPRADGLGVSSCIRQSLQDAGVAPEEVNYINPHATSTLAGDLAEMNAIKQVFKDPSGIKVNATKSMIGHCLGAAGGLEAIATIKAINTGLVHPSINQFDREPAVEFDTVPNVKVEHEINVGISNSFGFGGHNSVVVFAPFKP

SEQ ID NO: 951 - protein, 156 aa, Triticum aestivum
  misc_feature (1)..(1): Xaa can be any naturally occurring amino acid
  misc_feature (156)..(156): Xaa can be any naturally occurring amino acid
XENLLDPTASPSYIEEMQRDKHVLLQVWVPTMSYGQLVLTTRGMPFTLNKSSERLVQFRDVSTRYQLSADVASKGSLGLPGRVFIGKLPEWSPDVRYFTSYEYPMVAHAQYLDVHGTMGLPVFEKGNPSCLGVIELIMTRQKLNFTSEINNICSAX

SEQ ID NO: 952 - protein, 175 aa, Triticum aestivum
  misc_feature (27)..(27): Xaa can be any naturally occurring amino acid
  misc_feature (96)..(96): Xaa can be any naturally occurring amino acid
  misc_feature (120)..(121): Xaa can be any naturally occurring amino acid
  misc_feature (128)..(128): Xaa can be any naturally occurring amino acid
APSASLRSPLLALLLLLVAAAASTTSXVRPGGCSARRLRRPASRERRRGVGQQLCWEIVMDIRSCTGEIILFFLHGEAVLGPRCCRAVRPLERRCXAADDLLSLIGFTREEGDMLKGYCXXPPRQRRXRSTMGLFMALQVTGAVAAAAGRKGLGAAMKLRLWRVWSRYHVGACER

SEQ ID NO: 953 - protein, 411 aa, Triticum aestivum
  misc_feature (71)..(71): Xaa can be any naturally occurring amino acid
  misc_feature (78)..(78): Xaa can be any naturally occurring amino acid
  misc_feature (174)..(174): Xaa can be any naturally occurring amino acid
  misc_feature (216)..(216): Xaa can be any naturally occurring amino acid
MAAATTTTSRPLRLSRQQAAASSLQCRNQPLSGSRPGVDSEQASPPNVRRMAVVDSGAAPEEEQLRQRSSXDMITLTXEQEGVIENEMTIVLSSISTACKQIASLVQRAPISNLTGVQGATNVQGEDQKKLDVISNEVFSNCLRWSGRTGVIASEEEDVPVAVEESYSGNYIVXAFDPLDGSSNIHAVESTGSIFRMYSLSDECHIGDDANCRRRXTLDELTQMCIVNVCQPGSNLLAAGYCMYSSSVIFVLTIGTGVYVFTLDPMYGEFVLTQEKVQIPKSGKIYSFNEGNYALWDDKLKKYMDSLKEPGTSGKPYSARYIGSLVGDFHRTMLYGGIYGYPSDQKSKNGKLRLLYECAPMSFIAEQAGGKGSDGHQRVLDIMPTAVHQRVPLYVGSVEEVEKVEKFLSSE

SEQ ID NO: 954 - protein, 409 aa, Triticum aestivum
MAAATTTTSRPLLLSRQQAAASSLQCRLPRRPGSSLFAGQGQASTPNVRCMAVVDTASAPAPAAARKRSSYDMITLTTWLLKQEQEGVIDNEMTIVLSSISTACKQIASLVQRAPISNLTGVQGATNVQGEDQKKLDVISNEVFSNCLRWSGRTGVIASEEEDVPVAVEESYSGNYIVVFDPLDGSSNIDAAVSTGSIFGIYSPSDECHIGDDATLDEVTQMCIVNVCQPGSNLLAAGYCMYSSSVIFVLTIGTGVYVFTLDPMYGEFVLTQEKVQIPKSGKIYSFNEGNYALWDDKLKKYMDSLKEPGTSGKPYSARYIGSLVGDFHRTMLYGGIYGYPSDQKSKNGKLRLLYECAPMSFIAEQAGGKGSDGHQRVLDIMPTAVHQRVPLYVGSVEEVEKVEKFLSSE

SEQ ID NO: 955 - protein, 483 aa, Triticum aestivum
  misc_feature (150)..(150): Xaa can be any naturally occurring amino acid
MLENCRASFASLQAPPTRPPANAPQPCPGLSSPQPQPAGRRHRLPTLGVAPDRSVPPSNSSPRRETDPKMQVVITGMGLVSVSGTFEGAYYDRLLAGESGVCPIDRLDASKFPTRFAGQIRGFSSEGYIDGKNDRRLDDCLRYCIVSGKXKALESAGLAPDAMGKIDKARAGVLVGTGMGGLQVFSDGVQNLLEKGYRKITPFFIPYAITNMGSALLGMDIGFMGPNYSISTACATSNYCFYAAANHIRKGEADVMIAGGTEAAIIPIGVGGFVACRALSQRNDDPKTASRPWDKERDGFVMGEGAGVLVMESLEHAMKRGAPIVAEYLGGAVNCDAYHMTDPRADGLGVSSCIRQSLQDAGVAPEEVNYINRPATSTLAGDLAEMNAIKQVFKDPSGIKVNATKSMIGHCLGAAGGLEAIATIKAINTGLVHPSINQFEREPAVEFDTVPNVKVEHEINVGISNSFGFGGHNSVVVFAPFKP

SEQ ID NO: 956 - protein, 146 aa, Triticum aestivum
  misc_feature (21)..(21): Xaa can be any naturally occurring amino acid
  misc_feature (123)..(124): Xaa can be any naturally occurring amino acid
  misc_feature (140)..(140): Xaa can be any naturally occurring amino acid
YGPADHSRSASFLKEIHRKIXAASLPVVVGGDFNLLRFAEDKSNANVNFAWMQMFNDFIADLGLREIDRIGARFTWTNRQASPTQSVLDKVLVSPKWDLRCHLASLRAITRIGSDHVPLLLSXXPIPHRFRFETFWLSQXRFVEAV

SEQ ID NO: 957 - protein, 157 aa, Triticum aestivum
  misc_feature (149)..(149): Xaa can be any naturally occurring amino acid
  misc_feature (153)..(153): Xaa can be any naturally occurring amino acid
  misc_feature (157)..(157): Xaa can be any naturally occurring amino acid
KRGGKTNHSSCACAHSEAKTPEQKKKNRLTQSNPAQPGSTVPGILERPSCLVLDRLHGFSDVFLIRGAGGGVSFLDRRGGGSWTGGDRVVGWPAMSVSSSSMCGGDAGMKCVVWFRRDLRVEDNPALAAAARTAGEVVPAYVWSPEEDXPYFXGRVX

SEQ ID NO: 958 - protein, 176 aa, Triticum aestivum
  misc_feature (1)..(1): Xaa can be any naturally occurring amino acid
  misc_feature (43)..(44): Xaa can be any naturally occurring amino acid
  misc_feature (65)..(65): Xaa can be any naturally occurring amino acid
  misc_feature (165)..(165): Xaa can be any naturally occurring amino acid
XGPDGFSGGFFKSCWDTIKADLFEALNQLYHMDSRGLNRINSXXSLKDFLPISLLHSLIKIFTKXLATRLAPKLANLVDHCQSAFIKKQSIQENFLYIQSMIRKLHKAKQPTILLKLDIAKAFDSLSWPYILDMLEAWGFGARWREWIAMLLRTSTSRVILNGQXTDAIQHRQGLR

SEQ ID NO: 959 - protein, 87 aa, Triticum aestivum
WLWVHCIALYTISGVACFLLYMEYKRVATLRLLHLVRTMSKHSHFTVLVRGIPKSTHESFNSVVESFFTTYHAPSYLSHQVVYKVGK

SEQ ID NO: 960 - protein, 485 aa, Triticum aestivum
  misc_feature (9)..(9): Xaa can be any naturally occurring amino acid
LVQWRTLPXAMVADQWYDILGVLSGSMTVLPNGTVIMIYTGATNASAVEVQCIATPADPTDPLLRRWTKHPANPVIWSPPGVGTKDFRDPMTAWYDESDDTWRTLLGSKDDNNGHHDGIAMMYKTKDFLNYELIPGILHRVERTGEWECIDFYPVGRRSSDNSSEMLHVLKASMDDERHDYYSLGTYDSAANTWTPIDPDLDLGIGLRYDWGKFYASTSFYDPAKKRRVLMGYVGEVDSKRADVVKGWASIQSVPRTIALDEKTRTNLLLWPVEEIETLRLNATELSDVTMNTGSVIHIPLRQGTQLDIEATFHLDASAVAALNEADVGYNCSSSGGAVNRGALGPFGLLVLAAGDRRGEQTAVYFYVSRGLDGGLHTSFCQDELRSSRAKDVTKRVIGSTVPVLDGEAFSMRVLVDHSIVQGFAMGGRTTMTSRVYPMEAYQEAKVYLFNNATGATVTAERLVVHEMDSAHNQLSNMDDHSYVQ

SEQ ID NO: 961 - protein, 161 aa, Triticum aestivum
  misc_feature (1)..(1): Xaa can be any naturally occurring amino acid
  misc_feature (43)..(44): Xaa can be any naturally occurring amino acid
  misc_feature (58)..(58): Xaa can be any naturally occurring amino acid
  misc_feature (72)..(73): Xaa can be any naturally occurring amino acid
  misc_feature (161)..(161): Xaa can be any naturally occurring amino acid
XVFKLQKIVTGAKKVYRKFKHFKGTTVDQTCRSVTYRCCLCGXXSSNSFQLLPTEEQXKGKTLCEKFKLELXXAEECAAAFVFFKTRYAALIVSKILQTSNPMKWVTSLAPEPKDMYWSNLWLPYKQLWIRRIATLLGSIVFMFIILVPVTFIQGLTQLEX

SEQ ID NO: 962 - protein, 367 aa, Triticum aestivum
  misc_feature (155)..(155): Xaa can be any naturally occurring amino acid
  misc_feature (167)..(167): Xaa can be any naturally occurring amino acid
  misc_feature (206)..(206): Xaa can be any naturally occurring amino acid
  misc_feature (234)..(235): Xaa can be any naturally occurring amino acid
  misc_feature (265)..(265): Xaa can be any naturally occurring amino acid
  misc_feature (332)..(332): Xaa can be any naturally occurring amino acid
MADHLQVQQQHQHQLELPSGFRFHPTDEEIITSYLVPKVLNPTFTAIAIAEVDLNKNDPYELPKKAKMGEKEWYFYCQKDRKYPTGIQTNRATKAGYWKATGKDKEIFHPLPTLIGMKKTLVFYKGRAPRGEKTNWVMHEYRLEISKQPAYGPSXPPSPKLPPLMHXSKKERVVCKIFHKNIGVKKVVTPSYAMHMPMFIGGEQQXGLPQLMYVPASHGLRGIVVAGASVVSIXXRFFVPIACRQSRLGDDGQLGAPHGEQPPPXEMMGGNPMVSYQQQQMMQMQMQMGADQCFMVGVEPGSESSSMVSREGVDRLGNNVQGNGATTTIDSXIWVWMKCGSTHGQMIQDKIYMYVCMHESTIHQQIP

SEQ ID NO: 963 - protein, 129 aa, Triticum aestivum
  misc_feature (25)..(25): Xaa can be any naturally occurring amino acid
  misc_feature (30)..(31): Xaa can be any naturally occurring amino acid
  misc_feature (41)..(41): Xaa can be any naturally occurring amino acid
MDATSLEEEQVAAAAAAADNLDEEXGADGXXGGGGGHAGGXLKKGPWTTAEDALLVNHVRQHGEGNWNAVQRITGLLRCGKSCRLRWTNHLRPNLKKGAFSPDEELLVAQLHAQLGNKWARMATHLPGR

SEQ ID NO: 964 - protein, 364 aa, Triticum aestivum
  misc_feature (203)..(203): Xaa can be any naturally occurring amino acid
LKPPLPFLPAPLPPPPLTIPPALLPSLSPRARPAIAGRGDLVANPAAVLVHGVPPVEGVSLAGGASVLKAPGGAPATVSAAAGGLIGDAGFGGAPGAVGFPRNLAARRRVPGVLGGPGVDAGGAGFALAVRTPRADGPRRPDGDRDSIADRHPSADVLLVGADLKVDVIDYASVFHYGSISLIAERRRRAHLHAMMAAKEGGXALLSYDPNVQEALGPVLDEDRTNILSIWDEADIVNVNEVQLEFLTGINSVEDDVAMKLWRPTFKLMLVTLGDQGCKYYTNDSRSTVPSYKVQQVDTTGAGDAFIGSLLRKIVQDPSALQDKTKLEGAIKFANACGAITATKKGAIPSLPNEVVEMLLLEKV

SEQ ID NO: 965 - protein, 311 aa, Triticum aestivum
  misc_feature (7)..(7): Xaa can be any naturally occurring amino acid
  misc_feature (114)..(114): Xaa can be any naturally occurring amino acid
  misc_feature (137)..(137): Xaa can be any naturally occurring amino acid
  misc_feature (162)..(162): Xaa can be any naturally occurring amino acid
  misc_feature (171)..(171): Xaa can be any naturally occurring amino acid
  misc_feature (173)..(173): Xaa can be any naturally occurring amino acid
  misc_feature (225)..(225): Xaa can be any naturally occurring amino acid
  misc_feature (227)..(227): Xaa can be any naturally occurring amino acid
  misc_feature (229)..(229): Xaa can be any naturally occurring amino acid
  misc_feature (235)..(235): Xaa can be any naturally occurring amino acid
  misc_feature (238)..(238): Xaa can be any naturally occurring amino acid
  misc_feature (241)..(241): Xaa can be any naturally occurring amino acid
  misc_feature (248)..(248): Xaa can be any naturally occurring amino acid
  misc_feature (259)..(259): Xaa can be any naturally occurring amino acid
  misc_feature (269)..(271): Xaa can be any naturally occurring amino acid
  misc_feature (273)..(275): Xaa can be any naturally occurring amino acid
  misc_feature (277)..(277): Xaa can be any naturally occurring amino acid
  misc_feature (281)..(286): Xaa can be any naturally occurring amino acid
  misc_feature (292)..(294): Xaa can be any naturally occurring amino acid
  misc_feature (300)..(302): Xaa can be any naturally occurring amino acid
  misc_feature (304)..(305): Xaa can be any naturally occurring amino acid
  misc_feature (310)..(311): Xaa can be any naturally occurring amino acid
KNPQETXCYDKYLQADFKAAAAMVGHPEWEFPRDAGQYNDAPQRTRFFVDNGTYLTEQGRFFLAWYSNNLIKHGDKILDEANKVFLGHRARRAIKISGIHWWYKVPRHAAEVTXAGYYNLHDRDGYRPIARMLKRHXRASLNFTCAEMRDSEQSSQAMSAPXEELVQQVLXPXWKKGLNMACENALPRYDPTAYNTILRNARPHGINKSGPPEHKLFGFTYLRLXNXLXEGQNYXNFXTFXDKMHPPXLIPMFYPGPFXNRPTSINFLXXXNXXXFXKPPXXXXXXGGGTPXXXGKTLCXXXTXXGGNPXX

SEQ ID NO: 966 - protein, 296 aa, Triticum aestivum
  misc_feature (1)..(1): Xaa can be any naturally occurring amino acid
  misc_feature (42)..(43): Xaa can be any naturally occurring amino acid
  misc_feature (182)..(182): Xaa can be any naturally occurring amino acid
XWNKDVVSIESHSMGRFTITAKVTELSNNVQYWLTTAYRPTXXKEFFLEMANIAPLAGEPWLITGDFNMIYEARDKSNLNVNRRLMGRFRKALDFAGLKEIKCHNRRLTWSNERENPTFCSIDKFFCNVDWEALHNGYMLNAASTSFLDHCPLLLSPCASPPRPARFKFENHWPKFPHFQEXTVMHAWNRPVSHDCPYIKLKVKLQRTAKDLRIWSKSLFSKAKMQFHIANEVILGLDIAKENMQLTQEEFALRKMLKTRVLGLAAIERFRRRQASRVLWIRAGDASTKFFHAKCN

SEQ ID NO: 967 - protein, 166 aa, Triticum aestivum
  misc_feature (41)..(42): Xaa can be any naturally occurring amino acid
  misc_feature (166)..(166): Xaa can be any naturally occurring amino acid
QELLGSKAHDGTVNSASEASQASEARNFQYSDDRNCSINMXXNIPGVPGLGARTPPENHGFSYHCSGFGESQRFQKVLQGQEVFGPYEGGTLSDAVIRGSSFCQPDGNYTSRATYKWLMSQGCDYRGPVTPAMPQASSPLSVLMYLQTSSKIHGFEYVCRSLDKDX

SEQ ID NO: 968 - protein, 190 aa, Triticum aestivum
  misc_feature (119)..(119): Xaa can be any naturally occurring amino acid
  misc_feature (190)..(190): Xaa can be any naturally occurring amino acid
TRPAKALAADLLVHYGHSCLVPVTSSLLPVLYVFVEIRVDALRLAAAVRGAFPDPDAAPRLALAGTVQFIAAVHAAREMLTRDGYRVVVPQAKPLSAGEILGCTAPTLKKAEGVGVVVXVADGRFHLEAFMIANPAVKAYRFDPFLGVLVLEEYDHVGMKQARKEAVLAARKAKSWGVVLGTLGRQGSLX

SEQ ID NO: 969 - protein, 164 aa, Triticum aestivum
  misc_feature (160)..(160): Xaa can be any naturally occurring amino acid
  misc_feature (164)..(164): Xaa can be any naturally occurring amino acid
KQTHLPVSPHPPPPPPPWTPATPPPRSPSPRPTRPRAAPRRSRPPSGSYTPIPASILNDPTLAAAATSLLPAAYNFELHKTAHRIRSSGARRAALQLPEGLLLFSLPLSHLLGPFLAEDPSNDVLILADPTYGACCLGDRPAKALAADLLVHYGHSCLGXVPVX

SEQ ID NO: 970 - protein, 137 aa, Triticum aestivum
  misc_feature (135)..(135): Xaa can be any naturally occurring amino acid
  misc_feature (137)..(137): Xaa can be any naturally occurring amino acid
MARVAASRLATHVPSPTAAQLQPVVGKVAGKLPSWKAWLINKAGRLAFVKAVLSAIPIHQLLVLAPPKKTLKLLEKIERGFLWAGRAEANGGNCHVNWRRACRPIPLGGLGVHDLECTGLALRMRWLWPSHAGDXRX

SEQ ID NO: 971 - protein, 228 aa, Triticum aestivum
MAAAAAQRLLASSTKIVGAGRNYISHAKDLGNPVLKEPVLFLKPTSSFLHAGPTAGPIEVPEPLESLHHEVELAVVISRRARDVPEASAMDFVGGYALALDMSSNDLQSASKSAGLPWTLGKVQDTFTPISAVVPKSAIANPYDLELWLKVDGELRQKGLTSDMIFKIPFLISYISSIMTLMEGDVILTGTPPDGVGPVRVGQKINAGITDLIDVEFDVERRKRSFSY

SEQ ID NO: 972 - protein, 178 aa, Triticum aestivum
  misc_feature (14)..(14): Xaa can be any naturally occurring amino acid
  misc_feature (25)..(25): Xaa can be any naturally occurring amino acid
  misc_feature (44)..(44): Xaa can be any naturally occurring amino acid
  misc_feature (48)..(48): Xaa can be any naturally occurring amino acid
  misc_feature (59)..(59): Xaa can be any naturally occurring amino acid
  misc_feature (63)..(63): Xaa can be any naturally occurring amino acid
  misc_feature (77)..(77): Xaa can be any naturally occurring amino acid
  misc_feature (82)..(82): Xaa can be any naturally occurring amino acid
  misc_feature (102)..(102): Xaa can be any naturally occurring amino acid
  misc_feature (107)..(107): Xaa can be any naturally occurring amino acid
  misc_feature (110)..(110): Xaa can be any naturally occurring amino acid
  misc_feature (115)..(116): Xaa can be any naturally occurring amino acid
  misc_feature (120)..(120): Xaa can be any naturally occurring amino acid
  misc_feature (128)..(129): Xaa can be any naturally occurring amino acid
  misc_feature (138)..(140): Xaa can be any naturally occurring amino acid
  misc_feature (158)..(158): Xaa can be any naturally occurring amino acid
  misc_feature (160)..(160): Xaa can be any naturally occurring amino acid
  misc_feature (162)..(162): Xaa can be any naturally occurring amino acid
  misc_feature (167)..(167): Xaa can be any naturally occurring amino acid
  misc_feature (169)..(170): Xaa can be any naturally occurring amino acid
  misc_feature (174)..(174): Xaa can be any naturally occurring amino acid
  misc_feature (178)..(178): Xaa can be any naturally occurring amino acid
WKAFSPTTINSGRXAEFEGAVIALXHLLITRSDKVRALREAFYXQNLXNVTNLLATAWXFLIXIYFQGFRVVLSVRXKNARXQQGSYPIKLVYTSNMPIILXSALLXHLXFISHXXLRKXSGNFLVNXXGIWKELNIXXXSILVGGLCYYVTAMAMMXVXMXNGKNXLXXVIFXLELX

SEQ ID NO: 973 - protein, 204 aa, Triticum aestivum
  misc_feature (1)..(1): Xaa can be any naturally occurring amino acid
  misc_feature (204)..(204): Xaa can be any naturally occurring amino acid
XQEPLEFPIVNTCFSFCTDASSVDDSKECIGMGCCQTPFPGNISSFNTGSAPLPSLYNSTNQSFSPCSYSFVTEEDWFKFDRSYVSSTNFATKYTDGVPLVLDWVVGNKSCSEATKRSQYACQAKNSQCINVSNGPGYRCNCSQGYEGNPYLQGGCQDINECEPPNQSLSCQGKCTNTVGNYTCISFSAIFLMVCIFALRAEYX

SEQ ID NO: 974 - protein, 342 aa, Triticum aestivum
  misc_feature (1)..(1): Xaa can be any naturally occurring amino acid
  misc_feature (12)..(12): Xaa can be any naturally occurring amino acid
  misc_feature (249)..(249): Xaa can be any naturally occurring amino acid
  misc_feature (313)..(313): Xaa can be any naturally occurring amino acid
XTDGMIVILLDXLLQKGYGLGSGISLFIATNICESIMWKAFSPTTINTGRGPEFEGAVIALFHLLFTWPNKQRALQEAFYRQNLPNIMNLLATIAVFAAVIYLQGFRVEIPVKSSRQRGARGSYPVRLFYTSNMPIMLQSALSSNVFLISQMLYSRFSENLLVRLFGVWEAKDGSSQLHAASGLVYYMSPPQSMKDALLDPIHMSAYIIYMLGACALFSKTWIEVSGSSPRDVAKQLKDQGLVMAGHRXDQSMYKELKRIIPTAAAFGGACIGALSVTSDLLGALGSGTGTLLAVTIIYGYFEIAAKEGDMSXYEGHDHGLKAFETNERVARLIFSSTLEPR

SEQ ID NO: 975 - protein, 109 aa, Triticum aestivum
LKRGRRAVSESSDSETTTDSEEEITVDGAAANNAKPSQHSRRSSRQKQEVKYKEDSEDEDIGDDGNDDDDNNVSSSNFKRLRKGGVLHGDDQSSTPKFDEDKTGHNGHT

SEQ ID NO: 976 - protein, 319 aa, Triticum aestivum
  misc_feature (1)..(1): Xaa can be any naturally occurring amino acid
  misc_feature (5)..(5): Xaa can be any naturally occurring amino acid
  misc_feature (36)..(36): Xaa can be any naturally occurring amino acid
  misc_feature (277)..(277): Xaa can be any naturally occurring amino acid
  misc_feature (294)..(294): Xaa can be any naturally occurring amino acid
XLSMXLCSLHHASLQSCSHPRLSSVRAELCMQAISXNLDRWMCGCREVMHAMWRPQKFKGIYLMATAYVLTLTLPSAASVYWAFGDELLTHSNALSLLPRTPFRDAALVLMLVHQFITFGFACTPLYFVWEKLIGLHDCRSLCKRAAARLPVVVPIWFLAIVFPFFGPINSAVGSLLVSFTVYIIPALAHMITRGAARAREGAADRPPGIVGRWTGTYVINAFVVVWVLVVGFGFGGWASITNFVRQIDTFGLFTKCYQCPTPPTRTPPGRWRPPPXRCSRRRPLLRRRTSSAXPPAPQPQALKLKKPPRLLLWLALVN

SEQ ID NO: 977 - protein, 194 aa, Triticum aestivum
  misc_feature (60)..(60): Xaa can be any naturally occurring amino acid
  misc_feature (63)..(63): Xaa can be any naturally occurring amino acid
  misc_feature (66)..(66): Xaa can be any naturally occurring amino acid
FAACTKISLGNGKKINFWKDRWMHGIAPIALAPEVAKLAWKKNLKVADALTNNLWMKGLXIGXTTXEQVQQFVSLWEKIQEVQLSHDDDGITWILNSKGIYTAKDAYEAQFLGRIRQPLLEKAWKVKAENKIKFYLWLLLQNRNWTADRLSTRGWPCNPTCPFCDQAPETAIHILLGCPYSKEVWNMSGPIHPQ

SEQ ID NO: 978 - protein, 214 aa, Triticum aestivum
  misc_feature (154)..(154): Xaa can be any naturally occurring amino acid
  misc_feature (192)..(192): Xaa can be any naturally occurring amino acid
  misc_feature (197)..(197): Xaa can be any naturally occurring amino acid
  misc_feature (213)..(213): Xaa can be any naturally occurring amino acid
MAPKKAANNSSKSNEDDGFTAGKIYSISGPVVIAEDMIGVAMYELVRVGHDNLVGEVIRINGDQASIQVYEETSGVMVGDPVYRTGKPLSVELGPGLLNGIYDGIQRPLEAISKMAKSIYIPRGIAVPALDRDKKWEFTPSVKVGDHLSGGEVXGSVFENSFLANHKILFPPRARGTVTKIASKGEYTVVEXILEVXVDGKKDEYPMMQSWPXP

SEQ ID NO: 979 - protein, 192 aa, Triticum aestivum
MSLSSIARRLCCSRQSSTSRLSVVLARLHSTEAAKDTGAKRYKYPEVYDPYGPMPPASEKVVGLADRIAALPPEEIKQIAPALLLRLNQPAPQAISGQGFSMGSQGGAGAGAAKSEEKKAEKLVFDVKLEKFEAAAKIKIIKEIRTFTDLGLKDAKELVEKAPVILKQSLTKEEAEAIIAKIKAAGGVAVME

SEQ ID NO: 980 - protein, 225 aa, Triticum aestivum
PRVRLGTGYDISPYGNNYHDSQTGSSYYHGRNAIGSQGVTLAASFDPPYSENARSAKYSERDRIYGGKAAQNKAPKVEARDWPAGSHADLLSDWQRGQPEGDYRSRKPQVGHGVKVKSYKSIEQQINGAHSGSDARGRISQVKINVKSNSQHGRIGQKDSRSKAAHVQSEETESDSSERFEDGADMNLVEEQPNLQYSELHIPAYGAKKSNKLSKSVKTNYPAPT

SEQ ID NO: 981 - protein, 241 aa, Triticum aestivum
  misc_feature (1)..(1): Xaa can be any naturally occurring amino acid
  misc_feature (3)..(4): Xaa can be any naturally occurring amino acid
  misc_feature (130)..(131): Xaa can be any naturally occurring amino acid
  misc_feature (217)..(217): Xaa can be any naturally occurring amino acid
  misc_feature (241)..(241): Xaa can be any naturally occurring amino acid
XTXXSTRKCFSSLSTSIRKLLSFKAAGNESFQARRYSEAVEQYSAALAYNSDSRPFSAVCFCNRAAAYQALGQLTDAIADCSLAMVLDANYPKAISRRATLYEMIRDYGQSANDLRKLISLLQKQANNKXXGVSPKVFNKHSDLKQARARLLSAEDEARKDTPLNFYLILGVEPSCSPADVKKAYRKAALRHHPDKATQLLVRNENADDGFWKDVAXEVYADADHLFKTIGEAYNILSDPX

SEQ ID NO: 982 - protein, 145 aa, Triticum aestivum
MLRSFPQARPLLRRMGFDKRDAYFFKQIGKGMLCTYALFGAAWLWNETSPLGWWTLKPLPKEEKEMAHLYERREFPYPGDEEAVEEFIKSEGALGTTIGPKGFADTNVDSDKMQKQLQSKKFDQEAQNLWFRMRNEVAHELQEKG

SEQ ID NO: 983 - protein, 86 aa, Triticum aestivum
  misc_feature (1)..(1): Xaa can be any naturally occurring amino acid
  misc_feature (34)..(34): Xaa can be any naturally occurring amino acid
XPAGLRPPPAAFLSSSIDRSNPSVAFAFPFRVFXTKDDSIFYNEAKLREVLHFSNACGAICTTKKGAIPALPTTATALELISKGSN

SEQ ID NO: 984 - protein, 337 aa, Triticum aestivum
MAPLGDAVAPAAATAAPGLVVSFGEMLIDFVPDVAGVSLAESGGFVKAPGGAPANVACAISKLGGSSAFIGKFGDDEFGHMLVEILKQNGVNAEGCLFDQHARTALAFVTLKSNGEREFMFYRNPSADMLLTEAELNLDLIRRARIFHYGSISLITEPCRSAHVAATRAAKSAGILCSYDPNVRLPLWPSAQAARDGIMSIWKEADFIKVSDEEVAFLTQGDATDEKNVLSLWFEGLKLLIVTDGEKGCRYFTKDFKGSVPGYSVNTVDTTGAGDAFVGSLLVRVSKDDSIFYNEAKLREVLQFSNACGAICTTKKGAIPALPTTATALELISKGSN

SEQ ID NO: 985 - protein, 127 aa, Triticum aestivum
  misc_feature (1)..(1): Xaa can be any naturally occurring amino acid
  misc_feature (20)..(20): Xaa can be any naturally occurring amino acid
XGRVSGIVTLKKLECSKQAXSLWFEGLKLLIVTDGEKGCRYFTKDFKGSVPGYSVNTVDTTGAGDAFVGSLLVSVSKDDSIFYNEAKLREVLQFSNACGAICTTKKGAIPALPTTATALELISKGSN

SEQ ID NO: 986 - protein, 356 aa, Triticum aestivum
SPTHFLPFGRRTHQYTSLRAETLPAVKLRSTVQPCAHFIRALRDPMSPYMSNARSDVQVGIGPAGELRSPSYPESNGTWSFPGIGAFQCYDRYMRASLKAAAEAVGRPEWGNAGPEDSGSYNQWPEDTGFFRREGGWNTDYGQFFMSWYSQMLIEHGERILSACCSVFTGTPGVKVSVKVAGIHWHYGTRSHAPELTAGYYNTRNHDGYLPIARMIGRHGAVLNFTCVEMRNHEQPQDAQCMPEALVSQVASAAKEAGVGLAGENALPRYDETAHDQVLATAAEKAEEDRMVAFTYLRMGPDLFQPDNWRRFAAFVKRMTETGVRDVSREQVEREAQGVAHATQGVIQEAAVALCN

SEQ ID NO: 987 - protein, 176 aa, Triticum aestivum
  misc_feature (1)..(1): Xaa can be any naturally occurring amino acid
  misc_feature (10)..(10): Xaa can be any naturally occurring amino acid
  misc_feature (35)..(35): Xaa can be any naturally occurring amino acid
  misc_feature (41)..(41): Xaa can be any naturally occurring amino acid
  misc_feature (86)..(86): Xaa can be any naturally occurring amino acid
  misc_feature (94)..(94): Xaa can be any naturally occurring amino acid
  misc_feature (98)..(98): Xaa can be any naturally occurring amino acid
  misc_feature (140)..(140): Xaa can be any naturally occurring amino acid
  misc_feature (157)..(157): Xaa can be any naturally occurring amino acid
  misc_feature (162)..(162): Xaa can be any naturally occurring amino acid
XTEDQLVQVXREPKNAIGKQYKKLFKMNDVKLHIXENALRXIAKKAAVRETGARGLRSIMEGILTEAMFEIPDDAGEGKEKIIVVXVDEESVGXPTRXGCGAKIFRDDGALELYVYQNNIRVPGLIQRPKCSIICRLCLXVAFSAAKLWVYHTFDCXSSIYXWIILILCKANIFTE

SEQ ID NO: 988 - protein, 293 aa, Triticum aestivum
  misc_feature (1)..(1): Xaa can be any naturally occurring amino acid
  misc_feature (7)..(7): Xaa can be any naturally occurring amino acid
  misc_feature (191)..(191): Xaa can be any naturally occurring amino acid
  misc_feature (210)..(211): Xaa can be any naturally occurring amino acid
  misc_feature (215)..(215): Xaa can be any naturally occurring amino acid
  misc_feature (227)..(228): Xaa can be any naturally occurring amino acid
XHAARRXCRRVPWSSEMLQWQRTGYHFQPDGNFMNDPNAPMYYRGLYHFFYQYNPKGVVWNKIAWGHAVSPDLVHWRHLPVAMVPDQWYDINGVLTGSATMLPNGTVILLYTGNSDTFAQVQCLALPADPADPLLRTWTKHPANPVIFPPPGIGDRDFRDPMSAWFDKSDNTWRTIIGSKVVMPGIALSCXKTKDFIKYQLIPDPVHRVXXGTGXMWECIDLYPISXXGSDSSEEVIHVMKASVNDEWHDYYALGRFDAEANRWTPLDPEADVGIGMRVDWGKFYASTSFYDP

SEQ ID NO: 989 - protein, 265 aa, Triticum aestivum
  misc_feature (164)..(164): Xaa can be any naturally occurring amino acid
  misc_feature (205)..(205): Xaa can be any naturally occurring amino acid
  misc_feature (213)..(213): Xaa can be any naturally occurring amino acid
  misc_feature (224)..(224): Xaa can be any naturally occurring amino acid
  misc_feature (227)..(227): Xaa can be any naturally occurring amino acid
  misc_feature (229)..(229): Xaa can be any naturally occurring amino acid
  misc_feature (234)..(236): Xaa can be any naturally occurring amino acid
  misc_feature (238)..(238): Xaa can be any naturally occurring amino acid
  misc_feature (240)..(242): Xaa can be any naturally occurring amino acid
  misc_feature (245)..(245): Xaa can be any naturally occurring amino acid
  misc_feature (248)..(248): Xaa can be any naturally occurring amino acid
  misc_feature (250)..(250): Xaa can be any naturally occurring amino acid
  misc_feature (254)..(254): Xaa can be any naturally occurring amino acid
  misc_feature (257)..(259): Xaa can be any naturally occurring amino acid
  misc_feature (261)..(261): Xaa can be any naturally occurring amino acid
  misc_feature (263)..(263): Xaa can be any naturally occurring amino acid
  misc_feature (265)..(265): Xaa can be any naturally occurring amino acid
RRSGSRGADADGSPWSSEMLQWQRTGYHFQPDGNFMNDPNAPMYYRGLYHFFYQYNPKGVVWNKIAWGHAVSPDLVHWRHLPVAMVPDQWYDINGVLTGSATMLPNGTVILLYTGNSETFAQVQCLALPADPTDPLLRTWTKHPANPVIFPPPGIGDRDFRDPXAAWFDKSDNTWRTIIGSKDDHGHAGIALMYKTKDFIKYELXPGPVHRVXGTGLWGVLDLXPVXGXSNSPXXXSXGXXXKGXTNXTXTGRXDHXXXRXTXGX

SEQ ID NO: 990 - protein, 518 aa, Triticum aestivum
  misc_feature (445)..(445): Xaa can be any naturally occurring amino acid
QPGGAVWGNIAWGHAVSRDLIHWRHLPLAMVPDQWYDINGVWTGSATVLPDGSLVMLYTGSTNASVQVQCLAVPADPNDSLLRNWTKYEANPILVPPPGIGDKDFRDPTTAWFDESDKTWRTVIGSKDNHGHTGIVMTYKTKDFINYELIPGLLHSVPGTGMWECIDFYPVGGADGSEELYVMKESSDDDRHDWYALGRYDAAANKYTPIDPEMDVGIGLRYDWGKFYASKTFYDPSKNRRVLWGWIGETDSERADVAKGWASLQSIPRTVELDEKTRTNLIQWPVVEIETLRINSTDLGGTTIDTGSVLPLPLRRATQLDIEATFHLDTSAIAAVNEADVGYNCSTSGGAANRGALGPFGLLVLADGALKEQTAVYFYVSRGLDGGLQTHFCQDESRSSLAQDVVKRVVGFTVPVLDGEDLSLRVLVDHSIVESFAMGGRSTAXVEGVSDGGHLRRRWRVPFQQRHWRRRHRREARGARDGRLLQPDLHGRRCLGRLVAESNQALGPVMHIHLYYIL

SEQ ID NO: 991 - protein, 481 aa, Triticum aestivum
  misc_feature (220)..(220): Xaa can be any naturally occurring amino acid
  misc_feature (230)..(230): Xaa can be any naturally occurring amino acid
  misc_feature (378)..(378): Xaa can be any naturally occurring amino acid
  misc_feature (467)..(467): Xaa can be any naturally occurring amino acid
MAGGFRVLHLVRPFLAFLPEVQSADRKIPFREKVIYTVISLFIFLVCSQLPLYGIHSTTGADPFYWMRVILASNRGTVMELGITPIVTSGMVMQLLVGSKIIEVDNSVREDRALLNGAQKLLGILIAIGEAVAYVLSGMYGSVSQLGTGNAILIILQLFFAGIIVFFLDLLPMYARISFSRNSALLPSTVDEMLNWKGLGPTSINRVLGAEFEGGCLCIXFHLLITRSVXARGLLQAFSRQNLPNVTNLLATFLVFLIVIYFQGFRVVLPVRSKNARGQQGSYPIKLFYTSNMPIILHSALITNLYFISQLLYRKYSGNFLVNLLGIWKESEYSGHSIPVGGLAYYVTAPSSMADILANPFHALFYVVFMLSACALFXSKTWIEVSGSSAKDVAKQLKEQQMVMPGHRESNLQNIGTIYIPTAAAFGGVCIGALTVLADFMGAIGSGTGILLAVTIIYQYFETFEGXLATDLGFLGFCLTH

SEQ ID NO: 992 - protein, 202 aa, Triticum aestivum
  misc_feature (1)..(1): Xaa can be any naturally occurring amino acid
  misc_feature (28)..(28): Xaa can be any naturally occurring amino acid
  misc_feature (45)..(45): Xaa can be any naturally occurring amino acid
  misc_feature (64)..(64): Xaa can be any naturally occurring amino acid
  misc_feature (78)..(78): Xaa can be any naturally occurring amino acid
  misc_feature (89)..(89): Xaa can be any naturally occurring amino acid
  misc_feature (138)..(138): Xaa can be any naturally occurring amino acid
  misc_feature (144)..(144): Xaa can be any naturally occurring amino acid
XLLQALSTEMSDHFPLLLSCDADFNPFXRFRFENHWVHLEGFPSXTILESWQQIPNCNDCLLQXLHMKLISTGRALRXWNSCMIGDLQXRAAVSGELIFMLDQAMDKRMLSDNERQFRVVLKVNYLGIAALQHSMCRXRSKITXIREGDASSRFFQGKATTRRRKSFIHRLTIDGVLVTIPVGQEHAMFDFFSQLLLHHLRF

SEQ ID NO: 993 - protein, 238 aa, Triticum aestivum
  misc_feature (238)..(238): Xaa can be any naturally occurring amino acid
NTFSSSNSELHFSSSNEHTRNRIVVTQSNHHPSVGSRTRQKGTNVLSWLLPKSKRKTKSDMSPSTAECENMSQLLKEWGVFSLESLKKELAEANEHRDAALQEVGEMRSSLGELTSKLLSLEAYSTELKKALKKATSTKNAQSHSKRSASSRDDSLPVSQEVMVEGFLQIVSEARLSIKQFCKVLLQQVEDADNGLADKLNLLLQPYQLTLADKHSKVILYHLEALMNQAMYQDFENX

SEQ ID NO: 994 - protein, 341 aa, Daucus carota
APSMTTPEPASKRRVVLGEISNNSSAVSGNEDLLCREFEVPKCVAQKKRKRGVKEDVGVDFGEKFDDPQMCSAYVSDVYEYLKQMEMETKRRPMMNYIEQVQKDVTSNMRGVLVDWLVEVSLEYKLLPETLYLAISYVDRYLSVNVLNRQKLQLLGVSSFLIASKYEEIKPKNVADFVDITDNTYSQQEVVKMEADLLKTLKFEMGSPTVKTFLGFIRAVQENPDVPKLKFEFLANYLAELSLLDYGCLEFVPSLIAASVTFLARFTIRPNVNPWSIALQKCSGYKSKDLKECVLLLHDLQMGRRGGSLSAVRDKYKKHKFKCVSTLSPAPEIPESIFNDV

SEQ ID NO: 995 - protein, 292 aa, Oryza sativa; identical to SEQ ID NO: 763

SEQ ID NO: 996 - protein, 498 aa, Ipomoea batatas
APIPGVMPIGNYVSLYVMLPLGVVNADNVFPDKEKVEDELKQVKAGGCDGVMVDVWWGIIEAKGPKQYDWSAYRELFQLVKKCGLKIQAIMSFHQCGGNVGDAVFIPIPQWILQIGDKNPDIFYTNRAGNRNQEYLSLGVDNQRLFQGRTALEMYRDFMESFRDNMADFLKAGDIVDIEVGCGAAGELRYPSYPETQGWVFPGIGEFQCYDKYMVADWKEAVKQAGNADWEMPGKGAGTYNDTPDKTEFFRPNGTYKTDMGKFFLTWYSNKLIIHGDQVLEEANKVFVGLRVNIAAKVSGIHWWYNHVSHAAELTAGFYNVAGRDGYRPIARMLARHHATLNFTCLEMRDSEQPAEAKSAPQELVQQVLSSGWKEYIDVAGENALPRYDATAYNQMLLKLRPNGVNLNGPPKLKMSGLTYLRLSDDLLQTDNFELFKKFVKKMHADLDPSPNAISPAVLERSNSAITIDELMEATKGSRPFPWYDVTDMPVDGSNPFD

SEQ ID NO: 997 - protein, 605 aa, Fragaria x
MDTKIGSIDVCKTENHDVGCLPNSATSTVQNSVPSTSLSSADATLGRHLARRLVQIGVTDVFTVPGDFNLTLLDHLIAEPGLTNIGCCNELNAGYAADGYARSRGVGACVVTFTVGGLSVLNAIAGAYSENLPVICIVGGPNSNDYGTNRILHHTIGLPDFSQELRCFQTVTCFQAVVNNLEDAHEMIDTAISTALKESKPVYISIGCNLAGIPHPTFSREPVPFSLSPKLSNKWGLEAAVEAAAEFLNKAVKPVMVGGPKLRSAHAGDAFVELADASGFALAVMPSAKGQVPEHHPHFIGTYWGAVSTAFCAEIVESADAYLFAGPIFNDYSSVGYSLLLKKEKAIIVQPDRVTIGNGPTFGCVLMKDFLLGLAKKLKHNNTAHENYRRIFVPDGHPLKAAPKEPLRVNVLFKHIQNMLSAETAVIAETGDSWFNCQKLKLPPGCGYEFQMQYGSIGWSVGATLGYAQAVPEKRVISFIGDGSFQVTAQDVSTMIRNGQRTIIFLINNGGYTIEVEIHDGPYNVIKNWNYTGLVDAIHNGEGKCWTTKVRCEEELIEAIETANGPKKDSFCFIEVIVHKDDTSKELLEWGSRVSAANSRPPNPQ

SEQ ID NO: 998 - protein, 126 aa, Cyanophora paradoxa
MSSKTDEILEQLKGLTLIEAADLVKAIEEAFGVDASAPVGGGMVMMAPAAGGGADAAEEKSAFDLVLEEVPADKKIAVLKVVRSLTNLGLKEAKDLVEATPKVVKEGASKDELKQLKKNLKQLEQK

SEQ ID NO: 999 - protein, 527 aa, Yarrowia lipolytica
MIYTANSSPSTNLQGPSTLNTDDIPTKNYRKSSIIGTIAGLNIVRMNFSHGSYEYHQSVIENARESEQRFRGRPLAIALDTKGPEIRTGVTKDDKDWDVKAGHVMLFSTNPKYKDQCDDKIMYIDYTNIVKQIDIGKIIFVDDGVLSFKVLEKIDGETLKVETLNNGKISSRKGVNLPGTDVDLPALSEKDKADLKFGVEHGVDMIFASFVRTANDVQAIRDVLGEKGKGIQVISKIENQQGVNNFDEILKETDGVMVARGDLGIEIPAPQVFIAQKQLIAKCNLAGKPVICATQMLDSMTYNPRPTRAEVSDVGNAVLDGADCVMLSGETAKGTYPIESVKMMHETCLVAEKAIAYAPLFNEMRTLTVRPTETVETIAISAVSASFEQQARAIIVLSTSGTSARLCSKYRPNCPILMVTRNAQAARFSHLYRGVYPFIYHKARASNPAEWQHDVEERLKWGMDEAVALGILNKGDVVVAIQGWTGGLATPTLSEFSSVSKLFNTNLLDYKTYSMVIKSVNGGVLYK

SEQ ID NO: 1000 - protein, 424 aa, Bacillus halodurans
MFKFNDEKGQLKCSFCGKTQDQVRKLVAGPGVYICDECIELCTEIVEEELGTEEEVEFQEVPKPHEIREILDDYVIGQDLAKKSLSVAVYNHYKRINSMSKSEEVELSKSNICMIGPTGSGKTLLAQTLARILNVPFAIADATSLTEAGYVGEDVENILLKLIQAADYDVEKAEKGIIYIDEIDKVARKSENPSITRDVSGEGVQQALLKILEGTTASVPPQGGRKHPHQEFIQIDTTNILFICGGAFDGIEQIIKRRLGKKVIGFGSEVKQDELKPGEYLSKVLPEDLLRFGLIPEFIGRLPVISSLQPLDEEALIEILTKPKNALVKQYKKLLELDDVNLEFTDEALREIARKAIERKTGARGLRSIIEGLTLDVMFDLPARDDVETCIIHDKCVTEGEPPILKMKDGSEVAMTKPEPKESA

SEQ ID NO: 1001 - protein, 584 aa, Bacillus halodurans
MRKTKIVCTIGPASESVEKLEQLMEAGMNVARLNFSHGDFEEHGARIKNIREAAKRIGKTVAILLDTKGPEIRTQTLEGGVAELKAGQELVISMKEVVGTSERISVTYPGLVHDVVPGAKILLDDGLIGLEVVEVRDQEILTKVLNSGTLKNKKGVNVPNVSVNLPGITEKDAADIKFGIEQGVDFIAASFVRRAQDVLEIRELLEQHGAEHIKIIPKIENQEGVDNIEEILEVSDGLMVARGDLGVEIPAEEVPLVQKSLIKKCNLVAKPVITATQMLDSMQRNPRPTRAEASDVANAIFDGTDAIMLSGETAAGDYPVEAVQTMSRIAERAEQALNYQEILSKHTKEARTTITSAISQSVGHTAFNLNASAILTATESGHTARVVAKYRPKSPIVAVTSNETVVRQLALVWGVYSILGEEAETTDDMLQVTVETALKSQLVKQGDLVVITAGVPVGETGTTNIMKVHVIGEVVAKGQGIGRDTVNGKVVIAANAEEANAKVEEGSILVTFSTDKDMMPAFEKAAAVITEEGGITSHAAVVGLSLNTPVIVGVQNASALFKDGEEITVDTSRGDIYRGQASVL

SEQ ID NO: 1002 - protein, 468 aa, Arabidopsis thaliana
MYDLCISFSYVSGQSMELSDPNNGKTNKPKQPPKRFIKNQIPDSILGDASLNAAISILPSIYHFEVHKCVWRIKTSNAKRIALQLPEGLLMYALTLSDIFTSFAGASHCFVLGDVTYGACCVDDFSACALGADLLIHYGHSCLVPIDSTKIPCLYVFVEIQIDVKCLLNTIHLNLASDVKNIILAGTIQFTSAIRAVKPELEKQGFNVLIPQSKPLSAGEVLGCTAPKVKTVEDCKDQVLVFVADGRFHLEAFMIANPKIKAFRYDPYLGKLFLEEYDHKGMRETRMRAIARAREAKTWGIVLGTLGRQGNPKILERLEKKMMEKGIDSTVVLMSELSPTRVALFEDSVDAWVQIACPRLSIDWGEAFLKPLLTTFEAEIALGFIRGWWENDSSSRVNSSSGCCKEDKETSCACKNENVKDDKKDNDGALDGDYPMDYYAQEGGEWNSSYLKKSSRPIRRNPLPSSVV

SEQ ID NO: 1003 - protein, 581 aa, Arabidopsis thaliana
MIMYGGGGAGKDGGSTNHLSDGGVILKKGPWTAAEDEILAAYVRENGEGNWNAVQKNTGLARCGKSCRLRWANHLRPNLKKGSFTGDEERLIIQLHAQLGNKWARMAAQLPGRTDNEIKNYWNTRLKRLLRQGLPLYPPDIIPNHQLHPHPHHQQQQQHNHHHHHHQQQQQHQQMYFQPQSSQRNTPSSSPLPSPTPANAKSSSSFTFHTTTANLLHPLSPHTPNTPSQLSSTPPPPPLSSPLCSPRNNQYPTLPLFALPRSQINNNNNGNFTFPRPPPLLQPPSSLFAKRYNNANTPLNCINRVSTAPFSPVSRDSYTSFLTLPYPSPTAQTATYHNTNNPYSSSPSFSLNPSSSSYPTSTSSPSFLHSHYTPSSTSFHTNPVYSMKQEQLPSNQIPQIDGFNNVNNFTDNERQNHNLNSSGAHRRSSSCSLLEDVFEEAEALASGGRGRPPKRRQLTASLPNHNNNTNNNDNFFSVSFGHYDSSDNLCSLQDLKSKEEESLQMNTMQEDIAKLLDWGSDSGEISNGQSSVVTDDNLVLDVHQLASLFPADSTAVVAATNDQHNKNNNNNCSWDDMQGIR

SEQ ID NO: 1004 - protein, 466 aa, Arabidopsis thaliana
MDVPRPAFKCFDDDGRLKRSGTVWTASAHIITAVIGSGVLSLAWAIGQLGWIAGPTVMLLFSFVTYYSSTLLSDCYRTGDPVSGKRNYTYMDAVRSILGGFRFKICGLIQYLNLFGITVGYTIAASISMMAIKRSNCFHESGGKNPCHMSSNPYMIMFGVTEILLSQIKDFDQIWWLSIVAAIMSFTYSAIGLALGIIQVAANGVVKGSLTGISIGAVTQTQKIWRTFQALGDIAFAYSYSVVLIEIQDTVRSPPAESKTMKIATRISIAVTTTFYMLCGCMGYAAFGDKAPGNLLTGFGFYNPFWLLDVANAAIVIHLVGAYQVFAQPIFAFIEKQAAARFPDSDLVTKEYEIRIPGFRSPYKVNVFRAVYRSGFVVLTTVISMLMPFFNDVVGILGALGFWPLTVYFPVEMYIRQRKVERWSMKWVCLQMLSCGCLMITLVAGVGSIAGVMLDLKVYKPFKTTY

SEQ ID NO: 1005 - protein, 310 aa, Arabidopsis thaliana
MGRSPSSDETGLKKGPWLPEEDDKLINYIHKHGHSSWSALPKLAGLNRCGKSCRLRWTNYLRPDIKRGKFSAEEEETILNLHAVLGNKWSMIASHLPGRTDNEIKNFWNTHLKKKLIQMGFDPMTHQPRTDDIFSSLSQLMSLSNLRGLVDLQQQFPMEDQALLNLQTEMAKLQLFQYLLQPSPAPMSINNINPNILNLLIKENSVTSNIDLGFLSSHLQDFNNNNLPSLKTLDDNHFSQNTSPIWLHEPPSLNQTMLPTHDPCAQSVDGFGSNQASSSHDQEVAVTDSVDWPDHHLFDDSMFPDISYQS

SEQ ID NO: 1006 - protein, 586 aa, Sporosarcina psychrophila
MRKTKIVCTIGPASESPELLEQLIEAGMNVARLNFSHGNHAEHKARIDSIRKVAREKGKVVGILLDTKGPEIRTHSMMNGKLELVTGQKIDISMTQVEGNNDVFSVSYDKLIEDVNEGSVILLDDGLIQLEVTGKDVARGLIHTLIINSGSLSNNKGVNIPGVSVQLPGMTEKDAEDILFGIREGVDFIAASFVRRASDVMEIRALLENNNGSNLQIIPKIENQEGVDNIDEILNVSDGLMVARGDLGVEIPPEEVPLVQKNLIEKCNQAGKPVITATQMLDSMQRNPRPTRAEASDVANAIFDGTDAIMLSGETAAGIYPVESVQTMDRIALTTEAAIDYRSVVSTRRREKHGNMTEAIGQAAAYTAINLKVKAVLAPTESGHTAKMIAKYRPGCPVIAVTSSEMCSRKLSLIWGVYPIVGKKASSIDEILQESVEESVKHQYVGHGDVVIITAGVPVGEAGTTNLMKIHVIGDLLARGQGIGKDVAYGRTVVAKNAAEALAYDTEGAILVTNASDRDMMPAIEKCAGLITEEGGLTSHGAIVGLSLGIPIIVGVENATELIQHGKEITMDAESGVIYNGHASVL

SEQ ID NO: 1007 - protein, 336 aa, Acer pseudoplatanus
IQRPLKTIAKISGDVCVPRGVAVPALDKDILWEFQPKKIGEGDLLTGGDLYATAFENSLMQHHVALPPDGMGKVTYIAPPGQYSLKDTVLELEFQGVKKKITMLQTWPVRTPRPVASKLAADTPLLTGQRVLDALFPSVLGGTCAIPGAFGCGKTVISQALSKYSNSDTVVYVGCGERGNEMAEVLMDFPQLTMTLPDGREESVMKRTTLVANTSNMPVAAREASIYTGITIAEYFRDMGYNVSMMADSTSRWAEALREISGRLAEMPADSGYPAYLAARLASFYERAGKVKCLGGPERTGSVTIVGAVSPPGGDFSDPVTSATLSIVQVFWGLEL

SEQ ID NO: 1008 - protein, 444 aa, Oryza sativa
MAKATNGLGSQEPIPYLLSKNGPENVGKFLYLEGVEYIMWCTYDVHFYASFALLDLFPKIELSIQRDFANAVLYEDRRRMKFLADGTSGIRKVKGAVPHDLGTHDPWHEMNAYNIHDTSKWKDLNPKFVLQVYRDFAATGDMSFGRDVWPAVCAVMDYMNQFDRDGDGLIENDGFPDQTYDAWTVHGISAYCGGLWLAALQAAATMAHRLGDRPFAEKYKLKFIQAKAVYEAKLWNGSYFNYDSGTSSNSRSIQADQLAGQWYAASSGLPPLFDENKIRSALQKIFEFNVMKVKGGRLGAVNGMTPNGKVDETCMQSREIWTGVTYGVAANMLLHGMEHQGFTTAEGIFIAGWSEEGYGYWFQTPEGWTIDGHYRSLIYMRPLAIWAMQWARSPPKAILDAPKVNLMDRIHLSPQMIRAMNEINVRKIAPDNRCFPSSAFRCEC

SEQ ID NO: 1009 - protein, 452 aa, Medicago sativa
MKEVAPGTQDQKQPLRANSKRALSDVTYLPHKKRAILQDVTNNCGVNTKRSCLNPTEIQAKKRKVAKPAQPHVSNEVPSAAELPPFIADSKPVSSMEMRLRSSEDFRCLDDLEDNAPFRMSSNQCGTNNNLLQSQTSRISARPLSSQKKASQIVAAKKGNISELLDVSKHPDVADIDADFEDPQLCSHYAADIYDHLRVAELSRRPYPNFMETVQQDITPSMRAILVDWLVEVSEGYKLQANTLSLTVYLIDWFLSKNCIERERLQLLGITCMLIATKYEEINAPRIKDFCFIQDNTYTKEEVVKLESLVLKSSSYQLFAPTTKTFLRRFLRAAQASYKRPSIELEYLANYLAELTLMNYGFLNFLPSMVAASSVFLARWTLDQSSHPWNPTLEHYASYKASDLKATVLALQDLQLNSNDDCPLTTIRKKYTQDKLNCVAALSSPKLLETLF

SEQ ID NO: 1010 - protein, 764 aa, Thermoplasma acidophilum
MGKIIRISGPVVVAEDVEDAKMYDVVKVGEMGLIGEIIKIEGNRSTIQVYEDTAGIRPDEKVENTRRPLSVELGPGILKSIYDGIQRPLDVIKITSGDFIARGLNPPALDRQKKWEFVPAVKKGETVFPGQILGTVQETSLITHRIMVPEGISGKVTMIADGEHRVEDVIATVSGNGKSYDIQMMTTWPVRKARRVQRKLPPEIPLVTGQRVIDALFPVAKGGTAAVPGPFGSGKCVSGDTPVLLDAGERRIGDLFMEAIQDQKNAVEIGQNEEIVRLHDPLRIYSMVGSEIVESVSHAIYHGKSNAIVTVRTENGREVRVTPVHKLFVKIGNSVIERPASEVNEGDEIACASVSENGDSQTVTTTLVLTFDRVVSKEMHSGVFDVYDLMVPDYGYNFIGGNGLIVLHNTVIQHQLAKWSDANIVVYIGCGERGNEMTEILTTFPELKDPNTGQPLMDRTVLIANTSNMPVAAREASIYTGITIAEYYRDMGYDVALMADSTSRWAEALREISGRLEEMPGEEGYPAYLGRRVSEFYERSGRARLVSPDERYGSITVIGAVSPPGGDISEPVSQNTLRVTRVFWALDAALANRRHFPSINWLNSYSLYTEDLRSWYDKNVSSEWSALRERAMEILQRESELQEVAQLVGYDAMPEKEKSILDVARIIREDFLQQSAFDEIDAYCSLKKQYLMLKAIMEIDTYQNKALDSGATMDNLASLAVREKLSRMKIVPEAQVESYYNDLVEEIHKEYGNFIGEKNAEASL

SEQ ID NO: 1011 - protein, 512 aa, Thermoplasma acidophilum
MKALVEDDLFSKIGLDDVNSGVYDGEWVKPSGKMLTVKSPIDGSEVAKISLATRADYDRLVSRAIEEFKKWRMIPAPKRGLIIREIGDELRKEKKNLGKIVTIEAGKTPSEGEGEIQEMIDISDLALGLSRQLYGLTIASERPYHRMYEQWVPLGPVAVITSFNFPASVWSWNAFIAAVDGDVVIWKPSSKAALTAVAVMKVIERVLKRNNAPNIFFLMVSSGSEGGDWITNDPRIPLVSFTGSVPVGKKISENVAKRLGKSILELGGNNGAIVSDKADIDLALRGVVFGALATAGQRCTTTRRVIVQEKIYDQFLEKLKNAYSTIKVGDPREKGVLVGPLIDEDAVKDYEHAIDLAIKQGGKLIFGGKRITIKGLEGGHYVMPTIIEAKPDMPIVKEETFASILYVMKYRTIEEAIEIHNSVPQGLSSSIFTTDLREEEAFLSPYGSDCGLANVNTSTAGAEIGGAFGGEKDTGGGRESGSDAWKYYMRRQTVTKNWGQTLPLAQDVVFEF

SEQ ID NO: 1012 - protein, 428 aa, Thermoplasma acidophilum
MPRTYIDTLRDHEDGAKVVVYGWMQEARIMKNISFLMIRDNTGTIQATFKNDEATLDIIKRINRESIVRVDGSVNKKSISKAGIEISGTSISIVNEAEAPLPLPVVDPVQADLETRLNSRFMDLRKRNISAIFRIESALLWGIRQYLHSQKFIEVHTPKIVAAATEGGSDLFPVRYFEKDAYLNQSPQLYKEVLMSAGFDRVFEVGPAFRAEEHNTTRHLNEFTSIDIEMSFADHNDAMAMLENAIRSGIENAVRENAEDFESLGISISVPETPFPRITYEQCIDLLQKDGIDFTFGDDFSPDQLRTIGSRFSGFYFITEWPSSVRPFYTMPKSEDPRLTNSFDLQYREIEVTSGAQRVHDPKMLIQRFNEKKLDVKSFQFYVDAFKYGMPPHAGWGLGLERLTMILLGLNNIRETTLFPRDRTRIVP

SEQ ID NO: 1013 - protein, 483 aa, Nicotiana tabacum
MATTQNRRSSVSSATAKRQAMTANSSLENNNHGKLVAKKRPALTNISNHTTASARNSLSHSSKLAPCTSKAVSIKKSNSNAASSVLPTSSFVKPISKTVSIPRSDAAIPKITAIPLPATCSMDISPSHSDGSLVSMDETMSTSDSLRSPDVEYIDDNQTAAFDSIEKKAFSTLYISEDVKAADICKRDVLVDIESGDKIANIDNNFVDPQLCATMACDIYKHLRATEVKKRPSTDFMEKVQKDINASMRAILIDWLVEVAEEYRLVPDTLYLTVNYIDRYLSGNLMDRQRLQLLGVACMMIASKYEEICAPQVEEFCYITDNTYFKEEVLQMESTVLNYLKFEMTAPTAKCFLRRFVRAAQGLNEVLSLQLEHLASYIAELSLLEYNMLCYAPSVIAASAIFLAKYILLPSKKPWNSTLRHYTLYQPSDLRDCVVALHSLCCNNNNSSLPAIREKYSQHKYKFVAKKYCPPTIPVEFFQNISC

SEQ ID NO: 1014 - protein, 482 aa, Nicotiana tabacum
MATTQNRRNSVSSAVAKRQAMAENNHGKLPAGGAKKRPALTNISNHTTASARNSLSHSSKLAPCTSKVVSIKKNNSNAASSVLPTSSSFVKPISKTVSLPRSDAAVPKITAIPPLPSTCSMDISPSHSDGSLVSMDETMSTSNSLRSPDVEYIDDNQTAAFDSIEKKAFSTLYISEDVKAADICKRDVLVDMESGDKIANIDNNLVDPQLCATMACDIYKHLRATEVKKRPSTDFMEKVQKDINASMRAILIDWLVEVAEEYRLVPDTLYLTVNYIDRYLSGNLMDRQRLQLLGVACMMIASKYEEICAPQVEEFCYITDNTYFKEEVLQMESTVLNYLKFEMTAPTAKCFLRRFVRAAQGLNEVLSLQLEHLASYIAELSLLEYNMLCYAPSVIAASAIFLAKYILLPSKKPWNSTLRHYTLYQPSDLRDCVMALHSLCCNNNNSSLPAIREKYSQHKYKFVAKKYCPPTIPVEFFQNISC

SEQ ID NO: 1015 - protein, 490 aa, Saccharomyces cerevisiae
EDTAKDNYGKLPLIQSRDSDRTGQKRVKFVDLDEAKDSDKEVLFRARVHNTRQQGATLAFLTLRQQASLIQGLVKANKEGTISKNMVKWAGSLNLESIVLVRGIVKKVDEPIKSATVQNLEIHITKIYTISETPEALPILLEDASRSEAEAEAAGLPVVNLDTRLDYRVIDLRTVTNQAIFRIQAGVCELFREYLATKKFTEVHTPKLLGAPSEGGSSVFEVTYFKGKAYLAQSPQFNKQQLIVADFERVYEIGPVFRAENSNTHRHMTEFTGLDMEMAFEEHYHEVLDTLSELFVFIFSELPKRFAHEIELVRKQYPVEEFKLPKDGKMVRLTYKEGIEMLRAAGKEIGDFEDLSTENEKFLGKLVRDKYDTDFYILDKFPLEIRPFYTMPDPANPKYSNSYDFFMRGEEILSGAQRIHDHALLQERMKAHGLSPEDPGLKDYCDGFSYGCPPHAGGGIGLERVVMFYLDLKNIRRASLFPRDPKRLRP

SEQ ID NO: 1016 - protein, 575 aa, Vitis vinifera
SARAPSVISSSEATLGRHLARRLVQIGVSDVFSVPGDFNLTLLDHLIAEPGLKNIGCCNELNAGYAADGYARSRGVGACVVTFTVGGLSVLNAIAGAYSENLPVICIVGGPNSNDYGTNRILHHTIGLPDFSQEFRCFQTVTCYQAVVNNLEDAHEQIDTAISTALKESKPVYISISCNLPGIPHPTFSREPVPFCLAPKVTNQMGLEAAVEAAAAFLNKAVKPVMVGGPKLRVAKACEAFVELADACGYPVAVMPSAKGLVPECHPRFIGTYWGAVSTAFCAEIVESADSYIFAGPIFNDYSSVGYSLLLKKDKAILVQPERVVIGNGPAFGCILMKDFLKALSKRLKCNTTAYENYHRIYVPEGQPLRSDPKEPLRVNVLFQHIQKMLSSETAVIAETGDSWFNCQKLKLPKGCGYEFQMQYGSIGWSVGATLGYAQAVPNKRVISCIGDGSFQVTAQDVSTMIRCEQRTIIFLINNGGYTIEVEIHDGPYNVIKNWNYTGLVDAIHNGEGKCWTTKVVCEEDLINAIETATGSKKDCFCFIEVIAHKDDTSKELLEWGSRVSAANSRPPNPQ

SEQ ID NO: 1017 - protein, 513 aa, Chenopodium rubrum
SAKLACLHCDSRGSPLHLFYQYNPDSAVWGNITWGHAVSRNLIHWKYLPISMVPDQWYDINGVWTGSATILDGNIMLACLQVDSRGSPGTELEFAAALSDPLLLDWVKYSGNPVLTPPEGIGAKDFRDPTTAWLGPNGVWRFIIGSKKGKTGISLVYKTKDFKSYELEGNLHGVPDTGMWECVDFYPVSTTGQNGLDTSAYGPGMKHLLKASLDDNKQDHYALGTYDVASQTWTPDNPEMDVGIGLRLDYGKYYASKTFFDQNKQRRILWGWVGETDTEADDLLKGWSSLQSVPRVVTYDAKTGTNVIQWPVKEVESLRTDSIVYDNLVLQPGSIINLNITSAAQLDVSAEFMMDQEALKSTVGDDVINNCSAAAIRQALGPFGVLVLADGSLSEFTPVYFYIAKTSDGTVKNWFCTDQSRSSKASSVDKQVYGGPVPVLEGEKYSMRLLVDHSIVEAFGQGGRTCITSRIYPTKAINGEARVFLFNNATDLSVTASVKIWKLKSADISPYKF

SEQ ID NO: 1018 - protein, 487 aa, Saccharomyces cerevisiae
AKDNYGKLPLIQSRDSDRTGQKRVKFVDLDEAKDSDKEVLFRARVHNTRQQGATLAFLTLRQQASLIQGLVKANKEGTISKNMVKWAGSLNLESIVLVRGIVKKVDEPIKSATVQNLEIHITKIYTISETPEALPILLEDASRSEAEAEAAGLPVVNLDTRLDYRVIDLRTVTNQAIFRIQAGVCELFREYLATKKFTEVHTPKLLGAPSEGGSSVFEVTYFKGKAYLAQSPQFNKQQLIVADFERVYEIGPVFRAENSNTHRHMTEFTGLDMEMAFEEHYHEVLDTLSELFVFIFSELPKRFAHEIELVRKQYPVEEFKLPKDGKMVRLTYKEGIEMLRAAGKEIGDFEDLSTENEKFLGKLVRDKYDTDFYILDKFPLEIRPFYTMPDPANPKYSNSYDFFMRGEEILSGAQRIHDHALLQERMKAHGLSPEDPGLKDYCDGFSYGCPPHAGGGIGLERVVMFYLDLKNIRRASLFPRDPKRLRP

SEQ ID NO: 1019 - protein, 349 aa, Nostoc sp.
MAKTPESLESSINEITDRALDRDCTTLSRHVLQQLQSFSPDAQDLSALMNRIALAGKLVARRMSRAGLMEGVLGFTGEVNVQGESVKKMDVYANDVFISVFKQSGLVCRLASEEMENPYYIPENCPIGRYTLLYDPIDGSSNTDNNLSLGSIFAIRQQEGTDSDGKATDLLANGRKQLAAGYILYGPCTMLVYTIGKGVHSFVLDPSLGEFILTEENIRIPNHGSVYSVNEGNFWQWEESIREYIRYVHRTEGYSARYSGAMVSDIHRILVQGGVFLYPGTIQNPEGKLRLLYETAPLAFLIEQAGGRATTGLVNILDVVPKKLHQRTPLIIGSKEDVAKVESFIQNGH

SEQ ID NO: 1020 - protein, 533 aa, Hordeum vulgare
VNVKGNYVQVYVMLPLDAVSVNNRFEKGDELRAQLRKLVEAGVDGVMVDVWWGLVEGKGPKAYDWSAYKQLFELVQKAGLKLQAIMSFHQCGGNVGDAVNIPIPQWVRDVGTRDPDIFYTDGHGTRNIEYLTLGVDNQPLFHGRSAVQMYADYMTSFRENMKDFLDAGVIVDIEVGLGPAGEMRYPSYPQSHGWSFPGIGEFICYDKYLQADFKAAAAAVGHPEWEFPNDVGQYNDTPERTQFFRDNGTYLSEKGRFFLAWYSNNLIKHGDRILDEANKVFLGYKVQLAIKISGIHWWYKVPSHAAELTAGYYNLHDRDGYRTIARMLKRHRASINFTCAEMRDLEQSSQAMSAPEELVQQVLSAGWREGLNVACENALPRYDPTAYNTILRNARPHGINQSGPPEHKLFGFTYLRLSNQLVEGQNYVNFKTFVDRMHANLPRDPYVDPMAPLPRSGPEISIEMILQAAQPKLQPFPFQEHTDLPVGPTGGMGGQAEGPTCGMGGQVKGPTGGMGGQAEDPTSGIGGELPATM

SEQ ID NO: 1021 - protein, 533 aa, Hordeum vulgare
VNVKGNYVQVYVMLPLDAVSVNNRFEKGDELRAQLRKLVEAGVDGVMVDVWWGLVEGKGPKAYDWSAYKQLFELVQKAGLKLQAIMSFHQCGGNVGDAVNIPIPQWVRDVGTCDPDIFYTDGHGTRNIEYLTLGVDNQPLFHGRSAVQMYADYMTSFRENMKEFLDAGVIVDIEVGLGPAGEMRYPSYPQSHGWSFPGIGEFICYDKYLQADFKAAAAAVGHPEWEFPNDVGQYNDTPERTQFFRDNGTYLSEKGRFFLAWYSNNLIKHGDRILDEANKVFLGYKVQLAIKISGIHWWYKVPSHAAELTAGYYNLHDRDGYRTIARMLKRHRASINFTCAEMRDSEQSSQAMSAPEELVQQVLSAGWREGLNVACENALPRYDPTAYNTILRNARPHGINQSGPPEHKLFGFTYLRLSNQLVEGQNYANFKTFVDRMHANLPRDPYVDPMAPLPRSGPEISIEMILQAAQPKLQPFPFQEHTDLPVGPTGGMGGQAEGPTCGMGGQVKGPTGGMGGQAEDPTSGMGGELPATM

SEQ ID NO: 1022 - protein, 335 aa, Rhizobium rhizogenes
MTITPDIELGAYLLQRKIDPALASLIESIAASATVVADHLKEAAFQNHIGSAGTTNVQGEDQKLLDVLADRVFRETCGEAVSLAAYVSEEAEDVTWLKAPAAGDLILYVDPLDGSSNLEVNLSVGSIFAVSQVQADGDTNVLRKGRDYLCAGYAIYGPSTLFVITFGLGVVGFTLDPSDGQFKLTNARMRVPTETTEFAVNSSRQRFWDEPIRRYVDECLAGSAGPRGQDFNMRWTASMVADVHRILTRGGVFLYPADDSNRRAGGKLRLMYEANPMAFLIEAAGGAASTGTEDILRIQPQAHHQRVSVLLGSSNEIQRLVQFHQIHHSQEEIGS

SEQ ID NO: 1023 - protein, 586 aa, Haloferax volcanii
MSQATQDSVREDGVIASVSGPVVTARGLDARMNDVVYVGDEGLMGEVIEIEGDLTTIQVYEETSGVGPGEPVESTGEPLTVDLGPGMMDAIYDGVQRPLDVLESKMDSAFLDRGVDAPGIDLDEKWEFEPTVSEGDEVAPGDVVGTVPETVTIEHKVMVPPDFGGGEVVAVEEGEFSVTEAVVELDSGEEITMHQEWPVRQARPAAEKKTPREPLVSGQRILDGLFPIAKGGTAAIPGPFGSGKTVTQHQLAKWADADIVVYVGCGERGNEMTEVIEDFPELDDPKTGNPLMARTCLIANTSNMPVAARESCIYTGITIAEYYRDMGYDVALMADSTSRWAEAMREISSRLEEMPGEEGYPAYLAARLSEFYERAGYFTTVNGEEGSVSVIGAVSPPGGDFSEPVTQNTLRIVKTFWALDADLAERRHFPAINWNESYSLYQEQLDPWFVENVEDDWAEERQWAVDVLDEENELQEIVQLVGKDALPEDQQLTLEIARYLREAYLQQNAFHPTDTYCSPEKTYGILTAIHAFNDEAFKALEAGVPVEEIQAIEAAPRLNRIGVQEDWEAYIEDLKAEITEQLRELY

SEQ ID NO: 1024 - protein, 602 aa, Oryza sativa
MELALVGNPSNGVAKPSCNSVGSLPVVSSNAVIHPPVTSAARATLGRHLARRLVQIGATDVFAVPGDFNLTLLDYLIAEPGLKLIACCNELNAGYAADGYARALVGAFVTFTVGGLSVLNAIAGAYSENLPVICIVGGPNSNDYGTNRILHHTIGLPDFSQELRCFQTITCYQAVINNLDDAHEQIDTAIATALRESKPVYISVGCNLAGLSHPTFSREPVPLFISPRLSNKANLEYAVEAAADFLNKAVKPVMVGGPKIRVAKAKKAFAIAESSGYPFAVMPSAKGLVPEHHPRFIGTYWGAVSTTFCAEIVESADAYLFAGPIFNDYSSVGYSLLLKREKAVIVQPDRVVVGNGPAFGCILMTEFLDALAKRLDRNTTAYDNYRRIFIPDREPPNGQPDEPLRVNILFKHIKEMLSGDTAVIAETGDSWFNCQKLRLPEGCGYEFQMQYGSIGWSVGATLGYAQAAKDKRVISCIGDGSFQMTAQDVSTMLRCGQKSIIFLINNGGYTIEVEIHDGPYNVIKNWDYTGLIDAIHNSDGNCWTKKVRTEEELIEAIATATGAKKDCLCFIEIIVHKDDTSKELLEWGSRVSAANSRPPNPQ

SEQ ID NO: 1025 - protein, 454 aa, Arabidopsis thaliana
MSSSSRNLSQENPIPRPNLAKTRTSLRDVGNRRAPLGDITNQKNGSRNPSPSSTLVNCSNKIGQSKKAPKPALSRNWNLGILDSGLPPKPNAKSNIIVPYEDTELLQSDDSLLCSSPALSLDASPTQSDPSISTHDSLTNHVVDYMVESTTDDGNDDDDDEIVNIDSDLMDPQLCASFACDIYEHLRVSEVNKRPALDYMERTQSSINASMRSILIDWLVEVAEEYRLSPETLYLAVNYVDRYLTGNAINKQNLQLLGVTCMMIAAKYEEVCVPQVEDFCYITDNTYLRNELLEMESSVLNYLKFELTTPTAKCFLRRFLRAAQGRKEVPSLLSECLACYLTELSLLDYAMLRYAPSLVAASAVFLAQYTLHPSRKPWNATLEHYTSYRAKHMEACVKNLLQLCNEKLSSDVVAIRKNTSLQQRSFVPRHYRKSFSSDSVSGYVFFTLVYCTYC

SEQ ID NO: 1026 - protein, 429 aa, Buchnera aphidicola
MTDKSKDNSKSLLYCSFCGKNQKEVQKLIAGPKVYICDECIRLCNDIITEETIKQNNITDTENKINYLPKPHEIKKHLDNYVIGQNYTKKVLSVAVYNHYKRLYNFNKKTDSVELGKSNILLIGPTGSGKTLLAQTLAKLLDVPFTITDATTLTEAGYVGEDVENVIQKLLQKCKYNVKKAELGIVYIDEIDKIARKSDNPSITRDVSGEGVQQALLKLIEGTLASIPPQGGRKHPQQEFLQVNTSNILFICAGAFSELSKIVSKRLDAGTEIGFKANIKEKKQKKSEDFLLKQVEPEDLIKFGLIPEFIGRLPIITILNKLTEDALVNILCKPKNALIKQYQTLFELENVKLEFNAESIQLIAKKAMNKNTGARGLRSIIEGILLNIMYELPSMVNIEKILINESVVNSNSLPKIIYGKNKSKKASGE

SEQ ID NO: 1027 - protein, 122 aa, Buchnera aphidicola
MSITKEQILEAISEMSVMNVVDLITAMEEKFGVSASMSINSNNHNEKDLREEKTEFDIFLKVIGPNKVSVIKTVRSATGLGLKEAKDLVESAPTVLKENISKEDAESLKKTLEDVGAEIEIK

SEQ ID NO: 1028 - protein, 411 aa, Xylella fastidiosa
MNRRVVVTGMGMVSPLGNDLTTSWDGIVHGRSGIAPIVQIDASKLSTQIAGEIKGFDPMKFVSAKDAKKMDSFIYYGIGAAFMALDDAGLEINEINAERVGALIGSGIGGVFGIEEQTIKFYEGGVRKISPFYVPSTIINMLPGQLSVLKGLKGPTFSAVSACATSNHSIGMAMRMIQYGDADVMLAGGSERASSPTAIGGFCAMRAMSTRNDDPTGASRPWDKGRDGFVLGDGAGILVLEEYEYAKARGARIYAELAGFGATSDAFHMTMPVEDGEGAARCMRIALQDAKVTPEQIDYLNAHGTSTPLGDLCETNAIKTVLGDHAYKVMVSSTKSMTGHLLGAAGGVEAIFSVMALHTGIVPPTINLEEPDEGCDLDYVPHVAREAKLDVVVSNGFGFGGTNGTLVFKRI

SEQ ID NO: 1029 - protein, 404 aa, Campylobacter jejuni
MKRVVVTGIGMINALGLDKESSFKAICNGESGVNKITLFDATDFPVQIAAEVKNFDPLEVVDGKEVKKIDRFIQLGIKAAREAMQDAGFSEELDKEEFGIVSASGIGGLPNIEKNSIICSERGPRKISPFFIPSALVNMLGGLISIEHGLKGPNISCVTACAAGTHAIGEAYKSIALGNAKKMLVIGAEAAICPVGIGGFASMKALSTRNEDPQHASRPFDKERDGFVMGEGAGALVFEEYEEAKKRGATIYAELIGFGESADAHHITSPTLDGPLRAMKKALNMAGNPKVDYINAHGTSTPVNDKNETAAIKELFGNNIPLISSTKGQTGHCLGAAGAIEAVVSVMVLRDGVVPPTINQLVKDDECDLDYIPNISRKVDLKVVMSNSFGFGGTNGCVVFKKVD

SEQ ID NO: 1030 - protein, 294 aa, Arabidopsis thaliana
MDQYEKVEKIGEGTYGVVYKARDKVTNETIALKKIRLEQEDEGVPSTAIREISLLKEMQHSNIVKYDDVVHSEKRLYLVFEYLDLDLKKHMDSTPDFSKDLHMIKTYLYQILRGIAYCHSHRVLHRDLKPQNLLIDRRTNSLKLADFGLARAFGIPVRTFTHEVVTLWYRAPEILLGSHHYSTPVDIWSVGCIFAEMISQKPLFPGDSEIDQLFKIFRIMGTPYEDTWRGVTSLPDYKSAFPKWKPTDLETFVPNLDPDGVDLLSKMLLMDPTKRINARAALEHEYFKDLGGMP

SEQ ID NO: 1031 - protein, 470 aa, Vibrio cholerae
MKKTKIVCTIGPKTESVEKLTELVNAGMNVMRLNFSHGDYVEHGTRITNFRKVMEVTGKQLAILLDTKGPEIRTIKLENGDDVDLVAGQEFTFTTDTKVVGNKERVAVTYSGFAKDLNVGNRILVDDGLIEMEVLATTDTEVKCKVLNNGALGENKGVNLPGVSVNLPALSEKDKNDLKFGCEQGVDFVAASFIRKGSDVKEIREVLASHGGQNIQIISKIENQEGLDNFDEILELSDGIMVARGDLGVEIPAEEVIFAQKMMIEKCNRARKVVITATQMLDSMIKNPRPTRAEAGDVANAIMDGTDAVMLSGETAKGKYPVEAVKIMAQIAERTDPVLKAELGSRLDSPRLRITEAVCKGAVDTAEKLAAPLIIVATEAGKSARSVRKYFPTANIIAVTTNKKTAAQLVLSKGVTPVVVDAIDNTDAFYHLGKEIALQSGLGKKGDIVVMVSGALVASGTTNTASVHVL

SEQ ID NO: 1032 - protein, 501 aa, Xylella fastidiosa
MLLWLASVKEAFFMSERQRRTRILATLGPATDPPGVLDALFKAGVNVVRLNFSHGDASDQARRAAEVRAAAAHVGVEIGILADLPGPKIRIGRFTEGKVRLVADARFDLLADSNAPLGDATQVGVSYLGLPQDVAAGDVLLLDDGLMQLQVVQVQGARIVTTVLNDGVLSDRKGLNKQGGGLSLGALTDRDRELIGIVSRMGVDFIAVSFCRHAEEMHEARRIARECGCDAALVSKIERAEAIVNLAEIVAASDVVMVARGDLGVEIGDAQLPGLQKKIIKEALLQNKVVITATQMLQSMVESPMPTRAEVLDVANAVIDGTDAVMLSAETATGDYPVKAVEAMARICLGAEHQFEFDTDYEMAQRNLQRADHAIAMATMFLSEHICLGGVVALTESGTTPRFLSRFRSHVPIYAFTRHEDVRRRMVLMRGVFPMRFDSRGLTPREAARATIRLLVECGCMSPGDRVVFTSGEHMETLGATNTLRLLEVGADGGVSGLWEL

SEQ ID NO: 1033 - protein, 509 aa, Schizosaccharomyces pombe
MSSSAVSPKQWVAGLNSELDIPAVNRRTSIICTIGPKSNNVETLCKLRDAGMNIVRMNFSHGSYEYHQSVIDNARKASATNPLFPLAIALDTKGPEIRTGLTVGGTDYPISSGHEMIFTTDDAYAEKCNDKVMYIDYKNITKVIQPGRIIYVDDGILSFTVIEKVDDKNLKVRVNNNGKISSKKGVNLPKTDVDLPALSEKDKADLRFGVKNGVDMIFASFIRRAEDVIHIREVLGEEGKNIKIICKIENQQGVNNFDSILDVTDGIMVARGDLGIEIPASQVFVAQKMMIAKCNIAGKPVACATQMLESMTYNPRPTRAEVSDVGNAVLDGADLVMLSGETTKGSYPVEAVTYMAETARVAEASIPYGSLYQEMFGLVRRPLECATETTRVAAIGASIESDAKAIVVLSTSGNTARLCSKYRPSIPIVMVTRCPQRARQSHLNRGVYPVIYEKEPLSDWQKDVDARVAYGCQQAYKMNILKKGDKIIVLQGAVGGKGHTSIFRLTVAE

SEQ ID NO: 1034 - protein, 324 aa, Neisseria meningitidis
MDTLTRFLPEHLQQNQLPEALGGVLLSVVSACTEINAKVRLGALAGVLGMAGTGNIQGEDQKKLDVIANNIMIDTLKANSAVAGLASEEEDTFVNAGENGRYLVLFDPLDGSSNIDVNISVGTIFSILEKPEGALATESFLQTGRQQLAAGYVLYGPQTQLVFTFGHGVYMFTLNAENEFVLTKENPKVPESTKEFAINMSNRRHWLPPVQQYIDELLAGETGTRGKNYNMRWVASMVAEIHRILMRGGVFMYPQDKRDPAKPGKLRLMYEANPMSLILEQAGASASNAYQAMLDIQPENLHQRVAVFMGSSEEVAYLDRLHAK

SEQ ID NO: 1035 - protein, 585 aa, Thermococcus sp.
MGRIIRVTGPLVVADGMKGAKMYEVVRVGEMGLIGEIIRLEGDKAVIQVYEETAGIRPGEPVEGTGSSLSVELGPGLLTSMYDGIQRPLDVLRQLSGDFIARGLTAPALPRDKKWHFTPKVKVGDKVVGGDILGVVPETSIIEHKILVPPWVEGEIVEIAEEGDYTVEEVIVKVKKPDGTIEELKMYHRWPVRVKRPYKQKLPPEVPLITGQRTIDTFFSQAKGGTAAIPGPFGSGKTVTQHQLAKWSDAQVVVYIGCGERGNEMTDVLEEFPKLKDPKTGKPLMERTVLIANTSNMPVAAREASIYTGITIAEYFRDQGYDVALMADSTSRWAEALREISGRLEEMPGEEGYPAYLASKIAEFYERAGRVITLGSDERVGSVSVIGAVSPPGGDFSEPVVQNTLRVVKVFWALDADLARRRHFPAINWLRSYSLYVDAIQDWWHKNVDPEWRKMRDTAMALLQKEAELQEIVRIVGPDALPDREKAILIVTRMLREDYLQQDAFDEVDTYCPPKKQVTMMRVILNFYEKTMQAVDRGVPVDEIAKLPVREKIGRMKFEPDVEKVRALIDETNQQFEELFKKYGA

SEQ ID NO: 1036 - protein, 125 aa, Campylobacter jejuni
MAISKEDVLEYISNLSVLELSELVKEFEEKFGVSAAPVMVAGGAVAGGAVAAAEEKTEFDIVLTDGGAKKIEVIKIVRALTGLGLKEAKDAVEQTPSTLKEGVAKAEAEEAKKQLEEAGAKVELK

SEQ ID NO: 1037 - protein, 645 aa, Ehrlichia sp.
MAAERIIGIDLGTTNSCVAVMEAGTAKVIENSEGSRTTPSVVAFTDNERLVGELAKRQANINAQNTIYASKRIIGRRYDDMRDLKCPYEVFPAKNGDAWIRAKGEGYSPVQIGAFVLEKIKETAERYFGAPVKKAVITVPAYFNDAQRQATKDAGTIAGLDVVRIINEPTAAALAYGLDKGDKQRTIVVYDLGGGTFDVSVLEIADGVFEVKATNGDTKLGGEDFDNAIMEHMMESFQKETGINLRNDPMAVQRVKEAAEKAKIELSTRLETDITLPFISSDSTGAKHLSLKLSRAKFEGLVDELIERTIEPCKKALSDAGIKDNSKVDEVVLVGGMTRVPKVIQRVKDFFGKEPCQGVNPDEVVAVGAAIQGGILTGDVRDVLLLDVAPLSLGIETLGGVFTPLIERNTTIPTKKSQVFSTAEDGQTAVTIKVYQGERKMAIDNKLLGQFSLEGIPHAPRGVPQIEVTFDIDANGIVHVSAKDKASGKEQTIKIQSSGGLSDEEIKKMVKDAQDRAEDDEKRKKHVELKNSSEGLIHSVEKSLKDYGDKVAGADKSNIESAIKDLRECLNDSNCSTDTLQQKYDALMNLSMKLGEAAYAANKNDGAGSADQSGSSSGGSDGNPEERVVDSEYQEINKDEDKKNT

SEQ ID NO: 1038 - protein, 658 aa, Chlamydia muridarum
MFNMSEKRKSNKIIGIDLGTTNSCVSVMEGGQPKVIASSEGTRTTPSIVAFKGSETLVGIPAKRQAVTNPEKTLASTKRFIGRKFSEVESEIKTVPYKVAPNSKGDAVFEVENKLYTPEEIGAQILMKMKETAEAYLGETVTEAVITVPAYFNDSQRASTKDAGRIAGLDVKRIIPEPTAAALAYGIDKEGDKKIAVFDLGGGTFDISILEIGDGVFEVLSTNGDTHLGGDDFDEVIINWMLGEFKKQEGIDLSKDNMALQRLKDAAEKAKIELSGVSSTEINQPFITIDANGPKHLALTLTRAQFEHLASSLIERTKQPCAQALKDAKLSASDIDDVLLVGGMSRMPAVQAVVKEIFGKEPNKGVNPDEVVAIGAAIQGGVLGGEVKDVLLLDVIPLSLGIETLGGVMTPLVERNTTIPTQKKQIFSTAADNQPAVTIVVLQGERPMAKDNKEIGRFDLTDIPPAPRGHPQIEVTFDIDANGILHVSAKDAASGREQKIRIEASSGLKEEEIQQMIRDAELNKEEDKKRREASDIKNEADGMIFRAEKAIKDYQDKIPADLVKEIEEQIEKVRQAVKEDASTTAIKAASDELSARMQKIGEAMQAQSASAANAQGGPNINSEDLKKHSFSTRPPAGDNSSSTDNIEDADVEIVDKPE

SEQ ID NO: 1039 - protein, 642 aa, Neisseria meningitidis
MAKVIGIDLGTTNSCLAISENGQTKVIENAEGARTTPSVIAYLDGGEILVGAPAKRQAVTNAKNTIYAAKRLIGHKFEDKEVQRDIESMPFEIIKANNGDAWVKAQGKELSPPQISAEVLRKMKEAAEAYLGEKVTEAVITVPAYFNDSQRQATKDAGRIAGLDVKRIINEPTAAALAFGMDKGDNKDRKVAVYDLGGGTFDISIIEIANLDGDKQFEVLATNGDTFLGGEDFDQRLIDYIIDEFKKEQGIDLKQDVMALQRLKEAAEKAKIELSSGQQTEINLPYITMDATGPKHLAMKITRAKFESLVEDLIARSIEPCRTALKDAGLSTGDIDDVILVGGQSRMPKVQEAVRDFFGKEPRKDVNPDEAVAVGAAIQGEVLSGGRSDVLLLDVTPLSLGIETMGGVMTKLIQKNTTIPTKASQVFSTAEDNQSAVTIHVLQGERERASANKSLGQFNLGDIAPAPRGMPQIEVTFDIDANGILHVSAKDKGTGKAANITIQGSSGLSEEEIERMVKDAEANAEEDKKLTELVASRNQAEALIHSVKKSLADYGDKLDAAEKEKIEAALKEAEEAVKGDDKTAIDAKAEALGTASQKLGEMVYAQAQAEAQAGEGAQAESSAKKDDDIVDADFEEVKDDKK

SEQ ID NO: 1040 - protein, 417 aa, Campylobacter jejuni
MEFLSIGVKIMPRKCSFCNEVENPQRRILANENDDAFICEYCVEGAYSIIYGEEKEFKEPKQSHNTEFKDITPKELKAYLDRYVIGQDRAKKVFSVGVYNHYKRLFKAELQDDDTELFKSNILLVGPTGSGKTLLAQTLAKFLDVPIAICDATSLTEAGYVGEDVENILTRLLQAADGDVQRAQKGIVFIDEIDKIARMSENRSITRDVSGEGVQQALLKIIEGSLVNIPPRGGRKHPNQEFIQIDTSNILFVCGGAFDGLETILKRKLGDKVVGFFDDAKEENKALLEKIEPDDLVHFGLIPELIGRLHVIASLNELNEEDMVRILTEPKNAIIKQYQKLFAIDGVNLKFEEDALRAIAQLALERKTGARGLRSIIEEMMVDLMFELPEYKDYDIVITKEVVKDNAKALLIKRKIS

SEQ ID NO: 1041 - protein, 535 aa, Hordeum vulgare
MEVNVKGNYVQVYVMLPLDAVSVNNRFEKGDELRAQLRKLVEAGVDGVMVDVWWGLVEGKGPKAYDWSAYKQLFELVQKAGLKLQAIMSFHQCGGNVGDAVNIPIPQWVRDVGTCDPDIFYTDGHGTRNIEYLTLGVDNQPLFHGRSAVQMYADYMTSFRENMKEFLDAGVIVDIEVGLGPAGEMRYPSYPQSHGWSFPGIGEFICYDKYLQADFKAAAAAVGHPEWEFPNDVGQYNDTPERTQFLRDNGTYLSEKGRFFLAWYSNNLIKHGDRILDEANKVFLGYKVQLAIKISGIHWWYKVPSHAAELTAGYYNLHDRDGYRTIARMLKRHRASINFTCAEMRDSEQSSQAMSAPEELVQQVLSAGWREGLNVACENALPRYDPTAYNTILRNARPHGINQSGPPEHKLFGFTYLRLSNQLVEGQNYANFKTFVDRMHANLPRDPYVDPMAPLPRSGPEISIEMILQAAQPKLQPFPFQEHTDLPVGPTGGMGGQAEGPTCGMGGQVKGPTGGMGGQAEDPTSGMGGELPATM

SEQ ID NO: 1042 - protein, 762 aa, Arabidopsis thaliana
MLTRVVSAEEIKKVLFSMPNDKSPGPDGFTSEFFKESWEILGPEFILAIQSFFALGFLPKGVNSTILALIPKKLESKEMKDYRPISCCNVMYKVISKILANRLKLLLPQFIAGNQSSFVKDRLLIENVLLATDLVKDYHKDSISERCAIKIDISKASDSVQWSFLINTLTAMHFPEMFIHWIRLCITTPSFSVQVNGELAGFFQSSRGLRQGCALSPYLFVICMDVLSKLLDKVVGIGRIGYHPHCKRMGLTHLSFADDLMILTDGQCRSIEGIIEVFDLFSKWSGLKISMEKSTIFSAGLSSTSRAQLHTHFPFEVGELPIRYLGLPLVTKRLSSVDYAPLIEQIRKRIGSWSSRFLSFAGRFNLISSIIWSSCNFWLSAFQLPRACIQEIEKLCSSFLWSGTNLNSKKAKISWNQVCKPKSEGGLGLRSLKEANDVCCLKLVWRIISHGDSLWVKWVEHNLLKREIFWIVKENANLGSWIWKKILKYRGVAKRFCKAEVGNGESTSFWFDDWSLLGRLIDVAGIRGTIDMGISRTMSVADAWTSRRRRHHRQEILNTIEEVLSTQHQKRTQQQQQGRVLWKGKNDIYKDKFSTKNTWNYLRTTSNEVAWHKGVWFPHATPKYSFCLWLAAHDRLATGARMIKWNRGETGDCTFCRQGIETRDHLFFMQLHIGSLDSSCQRRLQHKPLKQLVPNHHLCYAAQALSNRELPHQIHPSSHCIHHLEGEKQKQTWRNTEYCRPINSMDRHTSQESNHHNSKAKG

SEQ ID NO: 1043 - protein, 470 aa, Arabidopsis thaliana
MLDLQPSDRRHGAPSSSGGVSGGDELIRTYKGWKGNNVFFLGGRLVFGPDARSILITVFLITAPVIVFCIFVGRKFIDDFPHHRGVSVLAVADLVFLLLTSARDPGIIPRNLYPPEPESNEGNGEPRLAHTPQSRLPRTKDMIVNGITVKIKYCDTCMLYRPPRASHCSICNNCVEKFDHHCPWLGQCIGLRNYRFYFMFVLCSTLLCIYVHVFCWIYVKRIMDSENINIWKSFLKTPASIALIIYTFICVWFVGGLTCFHLYLMSTNQSTYENFRYRYDRHENPFNKGIVGNFMEVFCTNVAVSQNSFREKVSKEPAIPPRTVNGGMSSPSLQKVSNDIEMGRKPVWHETVEEELGDIEKDMEAGVASRDLSRMLPPEESEGRGIMHSRESSRGRGIMHSRESSRGRRGGSWELSSRVNEDLRTRDESVSRVGEDSSESSDNDASRDLHVEIYDAVTSRGRTGTGIGRL

SEQ ID NO: 1044 - protein, 1411 aa, Arabidopsis thaliana
MARFQFCCVFVLVALAVLAVNPSSSYRFTIVEPKSGSDSDLDSDSESLLFHQDYSPPAPPPPPPHGPSVSCSEDLGGVGFLDTTCKIVADLNLTHDVYIAGKGNFIILPGVRFHCPIPGCSIAINVSGNFSLGAESTIVAGTLELTAGNASFANGSAVNTTGLAGSPPPQTSGTPQGIDGAGGGHGGRGACCLTDTKKLPEDVWGGDAYSWSTLQKPWSYGSKGGSTSREIDYGGGGGGKVKMDILQLLDVNGSLLANGGYGGAKGGGGSGGSIYIKAYKMTGIGKISACGGSGYGGGGGGRVSVDIFSRHDDPKIFVHGGYSIGCPDNSGAAGTLYDAVPRSLFVSNYNQTTDTYTLLLEFPFQPLWTNVYIQDKARATCPLLWSRVQVQGQISLLCGGVLSFGLAHYGTSVFELLAEELLMSDSTIKVYGALRMTVKMFLMWNSELHLDGGGGDTTVSTSMLEASNLFVLRGSSVIRSNANLGVHGQGFLNLTGPGDSIEAQRLVLSLFYRIYVGPGSILRAPLLNASRDAVTPKLYCERQDCPYELLNPPEDCNVNASLSFTLQDILVEGFIKGSVVHFHRAKTVTLEPSGEISASGMGGVGEGKLLGNGFGSGGGHGGKGGRVCYNNSCVEGGITYGNANLPCELGSGSGDFSPGYSSAGGGIVVIGSMEQPLSGLSLEGSIRVDGESVKRLSRDENGSIVAPGGGSGGTVLLFLRYLILGESSLLSSGGGSGSPGGGGGGGGGRIHFHWSNIPTGDIYQPIASVKGIIHARGGAAADDGFYGKNGTITGTACPKGLHGIFCKECPSGTFKNVTGSDPSLCRPCPVDELPTRAVYVTVRGGVSETPCPYRCISERYHMPHCYTALEELIYTFGGPWLFGLLLMGLLILLALVLSVARMKFVGVDDLPGPAPTQHGSQIDHSFPFLESLNEVLETNRAEQSQSHVHRMYFMGPNTFSEPWHLSHIPPEEIKEIVYEAAFNTFVDEINSIAAYQWWEGAIYSILSVVAYPLAWSWQQWRRKMKLQKLREFVRSEYDHSCLRSCRSRALYEGLKVAATSDLMLAYLDFFLGGDEKRTDLPPRLHQRFPMPILFGGDGSYMAPFSLQNDNILTSLMSQLGSPTTWYRLVAGVNAQLRLVRRGRLRSTFHSVLRWLETHANPALETHGIRVDLAWFQTTACGYCQYGLLIHTVEDCEPTSPQCVSETTWTEIQPRKNYGGIIDLDSLPSLKEKRDMFFLLSFLVHNTKPVGHQDMVGLVISMLLLGDFSLVLLTLLQLYSISLLDVLLALFILPLGLLLPFPAGINALFSHGPRRSAGLARVYALWNFMSLVNVFVAFLCGYVHYHSESSASKKIPFQPWNINMGESEWWIFPAGLVVCKIMQSQLINRHVANLEIQDRSLYSKDYELFWQS

SEQ ID NO: 1045 - protein, 258 aa, Arabidopsis thaliana
  misc_feature (76)..(76): Xaa can be any naturally occurring amino acid
NKWSAIATHLQGRTDNEIKNFWNTHLKKKLIQMGIDPVTHQPRTDLFASLPQLIALANLKDLIEQTSQFSSMQGEXPNNGNNFSPSSILDIDQHHAMNLLNSMVSWNKDQNPAFDPVLELEANDQNQDLFPLGFIIDQPTHHSNNKIHLNNSPSELPSQGDPLLDHVPFSLQTPLNSEDHFIDNLVKHPTDHEHEHDDNPSSWVLPSLIDNNPKTVTSSLPHNNPADASSSSSYGGCEAASFYWPDICFDESLMNVIS

SEQ ID NO: 1046 - protein, 206 aa, Schizosaccharomyces pombe
MNDHLKVVVTILNLPTPISLAPYFTSSIILKYSMFRIASRQTRNLRALSSSKNWARSLVNTRSFRAAASVQNNNAQIGEMVDKISSLSLLETSELVKQLKEKLNIAEIAPMAAVAPAVASAAPSEEKAPEEKKEEKTTWNLKLESFDAGSKAKVIKEVKSLLGLSLVDAKKFVESAPKVLKENILKEDAEAIKSKLEKLSCKVVLE

SEQ ID NO: 1047 - protein, 438 aa, Pyrococcus sp.
MYRTHYSSEITEELNGQKVKVAGWVWEVKDLGGIKFLWIRDRDGIVQITAPKKKVDPELFKLIPKLRSEDVVAVEGVVNFTPKAKLGFEILPEKIVVLNRAETPLPLDPTGKVKAELDTRLDNRFMDLRRPEVMAIFKIRSSVFKAVRDFFHENGFIEIHTPKIIATATEGGTELFPMKYFEEDAFLAQSPQLYKQIMMASGLDRVYEIAPIFRAEEHNTTRHLNEAWSIDSEMAFIEDEEEVMSFLERLVAHAINYVREHNAKELDILNFELEEPKLPFPRVSYDKALEILGDLGKEIPWGEDIDTEGERLLGKYMMENENAPLYFLYQYPSEAKPFYIMKYDNKPEICRAFDLEYRGVEISSGGQREHRHDILVEQIKEKGLNPESFEFYLKAFRYGMPPHGGFGLGAERVIKQMLDLPNIREVILFPRDRRRLTP

SEQ ID NO: 1048 - protein, 190 aa, Bacillus subtilis
EFIQIDTTNILFICGGRFDGIEQIIKRRLAQKVIGFGADNKAADLEKEDLLSKVLPEDLLRFGLIPEFIGRLPVIASLEKLDEEALVAILTKPKNALVKQFKKMLELDNVELEFEEEALSEIAKKAIERKTGARGLRSIIEGIMLDVMFELPSRDDIEKCVITGATVTHGEPPRLLLKDGTEVSQDKTSA

SEQ ID NO: 1049 - protein, 129 aa, Guillardia theta
MNKVQNIIDQLKDLTLLEAADLVKQIEETFNVSATAAAAPINMVAATAGAGSAEAVEEKTEFDLILEDVPADKKIAVLKVVRGLTGLGLKEAKDLVEAAPKPIKEGMSKADAEAGKKQLEEAGAKATLK

SEQ ID NO: 1050 - protein, 310 aa, Archaeoglobus fulgidus
MNNISIPFEKLGNAKKVGIQLPDGLKRRAIEIAQLIEDRGYDVVISGETSFGACDIDLSILEVVDVLLHFAHTPILKDERVVYVPYFIEYNPKIDLKVDERRIALIATAQYVHKLPEVAEWLRGKGYEVEIGSPRGRVVYPGQVLGCNYSVLRGSNADAVVFIGDGLFHATGAAMYTKKKVYAYNPLSGELKEVDARNFEKKRYLEVSKCVGKSKAGILVSSKPGQRRLRLAEKLKKIGRENGLFCSIIYLNNVRAEELYNLPFDFYVNTACPRIAYDDGARFEKPVISPQEFELLLGLRESIAMDEIEF

SEQ ID NO: 1051 - protein, 128 aa, Thermotoga maritima
MTIDEIIEAIEKLTVSELAELVKKLEDKFGVTAAAPVAVAAAPVAGAAAGAAQEEKTEFDVVLKSFGQNKIQVIKVVREITGLGLKEAKDLVEKAGSPDAVIKSGVSKEEAEEIKKKLEEAGAEVELK

SEQ ID NO: 1052 - protein, 618 aa, Poa secunda
MDSRGITPGAYAPLPSSGDDQRGGGVRYCLACVATVLAASAVVVVVAFVSVGGVRVLLAGGTGDSKDADAFPWSNSMLQWQRAGFHFQTEKNFMSDPNGPVYYRGYYHLFYQYNTKGVVWDDGIVWGHVVSRDLVHWRHLPIAMVPDHWYDNMGVLSGSITVLNSGRLVMIYTGVFSNTTDRSGMMEVQCLAVPAEPNDPLLRRWTKHPANPVLVHPPGIKDMDFRDPTTAWFDESDSTYRTVIGSKDDNQGDHAGFAMVYKTKDFLSFQRIPGILHRVEHTGMWECMDFYPVGGGDNSSSEVLYVIKASMNDERHDYYALGRYDAAGNTWTPLDPELDLGMGLRYDWGKFYASTSFYDPIKRRRVVLGYVGETDSRRSDEAKGWASIQSIPRTVALDKKTWTNLLLWPVQEIETLRANATAFNGITIDTGSVFLLPIRQGTQLDIEASFRLNASAVAAISEADVGYNCSSSGGAATRGVLGPFGLLVLADTRGEQTAVYFYVSRGLDGGLRTSFCNDESRSSWARDVTKRVVGSTVPVLDGEVLSMRVLVDHSIVQSFAMGGRVTATSRVYPTEAIYAAAGVYVFNNATGASVTAERLVMHEMDSVDNNQIFLVDDL

SEQ ID NO: 1053 - protein, 663 aa, Brassica oleracea
MASSDALLPISAREEDPLLSDGSRCDPNAETHRRRRPVKGLLAVSFGLLFIAFYVVLIATHDGSSRSNDVKIESDETATTTSRARLAGVSEKSNGQLWKLSGERNTVSFAWNNSVLSWQRTAFHFQPEQNWMNDPNGPLFYKGWYHFFYQYNPNAAVWGDIVWGHAVSKDLIHWVHLPIAMVADQWYDANGVWTGSATFLDDGSLVMLYTGSTDKSVQVQNLAYPEDLNDPLLLKWVKYSGNPVLVPPPGILPKDFRDPTTAWKTSDGKWRITIGSKINKTGISLVYDTIDFKTYEKHDTLLHKVPNTGMWECVDFYPVSKTAVNGLDTSVNGPNVKHIVKASMDDTRFDHYAVGTYFDSNGTWIPDDPTIDVGMSASLRYDYGKFYASKTFYDQNKGRRILWSWIGESDSEAADVQKGWSSLQGIPRTVVLDTKTGKNLVQWPVEEIKSLRLSSKQFDMEVGPGSVVPVDVDSAAQLDIEAEFEINKESLDKILGDASVVVEAEEFSCQKSGGASVRGALGPFGFSVLADKSLSEQTPVYFYVAKGKDSKLKTFFCTDTSRSTFANDVVKPIYGSSVPVLKGEKLTMRILVDHSIVEGFAQAGRTCISSRVYPTKAIYGAAKLFVFNNAIDATITASFKVWQMNSAFIHPYSEEAVRALSST

SEQ ID NO: 1054 - protein, 662 aa, Brassica oleracea
MAKSDALLPISAREEDPLLSDGSRSDPNAETHGRRRPVKGLLAVSFGLFFIAFYVALIATHDGSRSNDVKIESDGTATKASRAHLAGVSEKSNDQLWKLSGDRNTVAFSWNNSMLSWQRTAFHFQPEQNWMNDPNGPLFYKGWYHFFYQYNPNAAVWGDIVWGHAVSKDLIHWVHLPLAMAADQWYDANGVWTGSATFLEDGSIVMLYTGSTDKSVQVQNLAYPEDLNDPLLLKWVKFPGNPVLVPPPGILPKDFRDPTTAWKTSAGKWRITIGSKINRTGISLVYDTTDFKTYEKLETLLHKVPNTGMWECVDFYPVSKTLVKGLDTSVNGPDVKHIVKASMDDTRIDHYAIGTYFDSNGTWTPDDPTIDVGISTSLRYDYGKFYASKTFYDQNKGRRILWGWIGESDSESADVQKGWSSLQGIPRTVVLDTKTGKNLVQWPVEEVKSLRLSSKKFDMEVGPGSLVHIDVGSAAQLDIEAEFEIKKESLEKILGDASAAAEAEEFSCQKSGGSTVRGALGPFGFSVLAHESLSEKTPVYFYVAKGKDSKLITFFCTDSSRSSFANDVVKPIYGSSVPVLKGEKLTMRILVDHSIVEAFGQGGRTCITSRVYPTKAIYGAAKLFLFNNAIDATITASFKVWQMNSAFIQPYSEEAVRALSRT

SEQ ID NO: 1055 - protein, 621 aa, Hordeum vulgare
MAHGDRMTTFEESERESEYGYVRKVSGPVVVADGMGGAAMYELVRVGHDSLIGEIIRLEGDSATIQVYEETAGLTVNDPVLRTKKPLSCELGPGILGNIFDGIQRPLKTIAIKSGDVYIPRGVSVPALDKDQLWEFQPNKLGVGDNITNGDLYATVFENTLMKHHIALPPGAMGKISYIAPAGQYSLQDTVLELEFQGIKKEFTMLHTWPVRTPRPVASKLAADTPLLTGQRVLDALFPSVLGGTCAIPGAFGCGKTVISQALSKYSNSDTVVYVGCGERGNEMAEVLMDFPQLTMTLPDGREESVMKRTTLVANTSNMPVAAREASIYTGITIAEYFRDMGYNVSMMADSTSRWAEALREISGRLAEMPADSGYPAYLASRLASFYERAGKVQCLGSPDRTGSVTIVGAVSPPGGDFSDPVTSATLSIVQVFWGLDKKLAQRKHFPSVNWLISYSKYSTALEGYYEKFDPGFIDMRTKAREVLQREDDLNEIVQLVGKDALGESDKITLETAKLLREDYLAQNAFTPYDKYCPFYKSVWMMRNIIHFNQLANQAVERAANADGHKITYAVVKSRMGDLFYRLVSQKFEDPAEGEDVLVAKFQKLYDDLTAGFRNLEDEAR

SEQ ID NO: 1056 - protein, 589 aa, Lactobacillus delbrueckii
MKKTKIVSTLGPASDDIETITKLAEAGANVFRFNFSHGNHEEHLARMNMVREVEKKTGKLLGIALDTKGAEIRTTDQEGGKFTINTGDEIRVSMDATKAGNKDMIHVTYPGLFDDTHVGGTVLIDDGAVGLTIKAKDEEKRELVCEAQNTGVIGSKKGVNAPGVEIRLPGITEKDTDDIRFGLKHGINFIFASFVRKAQDVLDIRALCEEANASYVKIFPKIESQEGIDNIDEILQVSDGLMVARGDMGVEIPFINVPFVQKTLIKKCNALGKPVITATQMLDSMQENPRPTRAEVTDVANAVLDGTDATMLSGESANGLYPVQSVQAMHDIDVRTEKELDTRNTLALQRFEEYKGSNVTEAIGESVVRTAQELGVKTIIAATSSGYTARMISKYRPDATIVALTFDEKIQHSLGIVWGVEPVLAKKPSNTDEMFEEAARVAKEHGFVKDGDLVIIVAGVPFGQSGTTNLMKLQIIGNQLAQGLGVGTGSVIGKAVVANSAEEANAKVHEGDILVAKTTDKDYMPAIKKASGMIVEASGLTSHAAVVGVSLGIPVVVGVADATSKIADGSTLTVDARRGAIYQGEVSNL

SEQ ID NO: 1057 - protein, 888 aa, Candida albicans
MAPQQVNAFSANGSIPSPKEFEGKGKLKLSGRILNVMTSLPLQIISDYDNKTGQYYWDVETVRGNSALYSSQHFLAENKEWETHLIAWTGELINKKKDTSSLTADTLQDDPLYLDEEDKSKIEKKLCDASGTPNIHPVWLLRRDQGRWRKYAENVLWPVFHYIQGQPSDGKAETDAWHDYVKFNEAYLNKIKSVYKPGDIIWIHDYYLLLLPQLLRMEFPNAYIGFFLHVPFPSSEYFRCLSKRSQLLDGMLGADKIGFQSDSFQRHFISCCARVLGCEVNRDSVSAYGTTISVETLPIGIDTEKIEHDAFSSELGVEEKVQALKQVYKGKKLIVGRDRLDKVRGVIQKLEGFEIFLDMYPEWRETVVLIQVSSPGYSHSANVETRVTEIISRINSKYGNLNHTPVLHYQMRVAKEEYLALLRVADLALITSVRDGMNTTSLEFVICQKYNNSPLILSEFTGTATVLKDAIMVNPWDSVGVAKTINDALMLSTKEKVSLESKLYEKVLSNTVQNWTSTFICDILSHSIVTHSNSYTPALNRPLLLNNYKESQRRLFLFDYDGTLTPIVQDPAAAIPSDKLNRILDVLSSDPKNQIWIISGRDQAFLEKWMGNKNVGLSAEHGCFMKDIGSKEWVNLAASFDMSWQEKVDDIFKYYTEKTPGSNIERKKVALTWHYRRADPDLGNFQAEKCMKELNDTVAKEYDVEVMAGKANIEVRPKFVNKGEIVKRLVLHPHGAKQEKHPTGHCTKDIPIEELPDFMLCLGDDLTDEDMFNSLNEINKKWKGDNRPTNKFGSYGVYPVAVGPASKKTVAIAHLNEPRQVLETLGLLAGLVSIFESAGTVDLDDRGHLANSVSSERSKHAVSKAVSLRKKASQEKEIVKEDPTNGAK

SEQ ID NO: 1058 - protein, 123 aa, Bacillus subtilis
MALNIEEIIASVKEATVLELNDLVKAIEEEFGVTAAAPVAVAGGAAAGGAAEEQSEFDLILAGAGSQKIKVIKVVREITGLGLKEAKELVDNTPKPLKEGIAKEEAEELKAKLEEVGASVEVK

SEQ ID NO: 1059 - protein, 639 aa, Arabidopsis thaliana
VTSLQDPLSESRSDQIPETRRRRPIKVHLAVYSGLLLIALYVTLIVTHDGSKAEIATESRPRMAGVSEKSNDGVWISSDDGKVEAFPWNNTILSWQRTAFHFQPEKNWMNDPNGPLFYKGWYHFFYQYNPNAAVWGDIVWGHAVSKDLIHWLYLPIAMVPDQWYDANGVWTGSATFLDDGSIVMLYTGSTDEFVQVQNLAYPEDPSDPLLLKWVKFSGNPVLVPPPGIGAKDFRDPTTAWKTSSGKWRITIGSKINRTGISLIYDTTDFKTYEKHETLLHQVPNTGMWECVDFYPVSKTQLNGLDTSVNGPDVKHVIKASMDDTRIDHYAIGTYDDSNATWVPDNPSIDVGISTGLRYDYGKYYASKTFYDQNKGRRILWGWIGESDSEAADVQKGWSSVQGIPRTVVLDTRTHKNLVQWPVEEIKSLRLSSKKFDMTIGPGTVVPVDVGSATQLDIEAEFEIKTDDLKLFFDDDSVEADNKFSCETNGGSTARGALGPFGFSVLADEGLSEQTPVYFYVTKGKHSKLNTVFCTDTSRSTLANDVVKPIYGSFVPVLKGEKLTMRILVDHSIVEGFAQGGRSCITSRVYPTKAIYGATKLFLFNNAIDATVTASFTVWQMNNAFIHPYSSDDLGVPSST

SEQ ID NO: 1060 - protein, 611 aa, Bacillus subtilis
MSKVIGIDLGTTNSCVAVLEGGEPKVIANAEGNRTTPSVVAFKNGERQVGEVAKRQSITNPNTIMSIKRHMGTDYKVEIEGKDYTPQEVSAIILQHLKSYAESYLGETVSKAVITVPAYFNDAERQATKDAGKIAGLEVERIINEPTAAALAYGLDKTDEDQTILVYDLGGGTFDVSILELGDGVFEVRSTAGDNRLGGDDFDQVIIDHLVSEFKKENGIDLSKDKMALQRLKDAAEKAKKDLSGVSSTQISLPFITAGEAGPLHLELTLTRAKFEELSSHLVERTMGPVRQALQDAGLSASEIDKVILVGGSTRIPAVQEAIKKETGKEAHKGVNPDEVVALGAAIQGGVITGDVKDVVLLDVTPLSLGIETMGGVFTKLIDRNTTIPTSKSQVFSTAADNQTAVDIHVLQGERPMSADNKTLGRFQLTDIPPAPRGVPQIEVSFDIDKNGIVNVRAKDLGTGKEQNITIKSSSGLSDEEIERMVKEAEENADADAKKKEEIEVRNEADQLVFQTEKTLKDLEGKVDEEQVKKANDAKDALKAAIEKNEFEEIKAKKDELQTIVQELSMKLYEEAAKAQQAQGGANAEGKADDNVVDAEYEEVNDDQNKK

SEQ ID NO: 1061 - protein, 443 aa, Petroselinum crispum
MASIPVVQQNRVEAAGGGAVKQKNMAAVEGRNRRALGDIGNLVTGHGIEGKQQQIPQVSRPVTRGFCAQLLANAQAGVVENNKKQRAIVGDGVVAVRQKKVSVKPKPEDIIVISPDTEEADRVNKHLNRKKATEGSLKKKGQTFTSTLTARSKAAAFGLTRKPKEQIVDIDAADANNELAAVEYVEDMYKFYKLAEHESRVFDYIDFQPEINQKMRAILVDWLIEVHNKFELMPETLYLAINILDRYLSTESVARKELQLVGISSMLTASKYEEIWPPEVNDLTKISDNAYTNQQVLIMEKKILGQLEWNLTVPTPYVFLVRFIKASIPNEPAVENMACFLTELGMMNYATVTYCPSMVAASAVYGARCTLDKAPFWNETLKSHTGFSEEQLMECGRTLVRFHSCATENKLRVIYRKYSLDERGCVAMLPPAKALLTVAKPQT

SEQ ID NO: 1062 - protein, 347 aa, Schizosaccharomyces pombe
MKKDLDEIDTDIVTLSSFILQEQRRYNQKHKNEEGKPCIIQEASGELSLLLNSLQFSFKFIANTIRKAELVNLIGLSGIVNSTGDEQKKLDKICNDIFITAMKSNGCCKLIVSEEEEDLIVVDSNGSYAVTCDPIDGSSNIDAGVSVGTIFGIYKLRPGSQGDISDVLRPGKEMVAAGYTMYGASAHLLLTTGHRVNGFTLDTDIGEFILTHRNMKMPLQHSIYSINEGYTAFWDEKIARFIAHLKESTPDKKPYSARYIGSMVADMHRTILYGGLFAYPCSKGNNGKLRLLYECFPMAFLVEQAGGIAVNDKGDRILDLVPKTLHGKSSIWLGSKHEVEEYINFIK

SEQ ID NO: 1063 - protein, 409 aa, Triticum aestivum; identical to SEQ ID NO: 954

SEQ ID NO: 1064 - protein, 462 aa, Hordeum vulgare
MHAHAAHALGLRVPPPAFPRRRARPRRRPAAAVLATSAAPQRETDPRKRVVITGMGLASVFGSDVDTFYDRLLAGESGVGPIDRFDASSFPTRFAGQIRGFSSEGYIDGKNDRRLDDCIRYCILSGKKALESAGLGAGSDAHVKLDVGRAGVLVGTGMGGLSVFSDGVQNLIEKGYRKISPFFIPYAITNMGSALLAIDVGFMGPNYSISTACATSNYCFYAAANHIRRGEADIIVAGGTEAAIIPIGLGGFVACRALSQRNDDPITACRPWDKERDGFVMGEGAGVLVMESLEHAMKRDAPIIAEYLGGAVNCDAYHMTDPRADGLGVSSCITMSLRDAGVAPEEVNYINAHATSTLAGDLAEVRAIKQVFKNPSEIKINSTKSMIGHCLGAAGGLEAIATIKSITTGWVHPTINQFNPEPEVDFDTVANEKKQHEVNVGISNSFGFGGHNSVVVFAPFKP

SEQ ID NO: 1065 - protein, 510 aa, Flavobacterium lutescens
MSFELLKALGLDATNSGTYLGDGEWSSATGAGTISPRNPTTGEVIAQVQATTEADYETILARAQQAFKVWRTTPAPRRGEAIRLCGEALRRHKDALGSLVALEMGKSKPEGDGEVQEMIDIADFAVGQSRMLYGYTMHSERPGHRMYEQYQPLGIVGIISAFNFPVAVWAWNSFLAAICGDVCIWKPSNKTPLTAIASMRICNEALREGGFPDIFFLINDAGTALSEKLVEDKRVPLISFTGSTQVGRIVNQKVAARLGRCLLELGGNNAIILDETADLKLAVPGIVFGAVGTAGQRCTTTRRLIVHESIYDNVLATLIKAYKQVEGKIGDPLDAANLMGPLNSPEAVQQFLASIEKAKAAGGTVQTGGTAIDRPGNFVLPAIVTGLKNSDEVVQHETFAPILYVMKYSTLDEAIEMQNGVPQGLSSSIFTTNLKAAEKFLSAAGSDCGIANVNIGTSGAEIGGAFGGEKETGGGRESGSDAWKVYMRRQTNTINYSDSLPLAQGIKFDL

SEQ ID NO: 1066 - protein, 937 aa, Arabidopsis thaliana
MVGATLFHRRKHSWPTEEFISRSTLQLLDFDSAAPPPHAWRRRLNCHANILKEFTITFREAIKMVRLGIRLWSYVREEASHGRKAPIDPFTKENCKPSASQGVPLGGMGSGSISRGFRGEFKQWQITPGTCDPSPMMSNQFSIFISRDGGHKKYASVLSPGQHGSLGKSRDKGLSSWGWNLNGQHSTYHALFPRAWTIYDGEPDPELKISCRQISPFIPNNYRDSSLPAAVFVYTLVNTGKERAKVSLLFTWANSMGGTSHMSGGHVNEPFMTGKGNPPVTFAIAASETQNVNVTVLPCFGLSEDSSFTAKDMWDTMEQDGKFDQENFNSGPSTPSLAGDTICAAVSASAWVEAHGKCTVSFALSWSSPKVKFSKGSTYDRRYTKFYGTSPRAALDLVHDALTNYKRWEEDIEAWQNPILRDERLPEWYKFTLFNELYFLVAGGTVWIDSSSLNANGNSQHQQSGLGNSDGKVGGLDINDQRNDLGNGNSVGVKSNDEVSAIHNRNGLFVDTPHVDDGDDVGRFLYLEGVEYVMWCTYDVHFYASYALLMLFPKIELNIQRDFAKAVLSEDGRKVKFLAEGNVGIRKVRGAVPHDLGMHDPWNEMNAYNIHDTSRWKDLNPKFVLQVYRDFAATGDYQFGIDVWPAVRAAMEYMEQFDRDNDDLIENDGFPDQTYDTWTVHGVSAYCGCLWLAALQAAAAMALQIGDKFFAELCKNKFLNAKAALETKLWNGSYFNYDSGSSSNSKSIQTDQLAGQWYAASSGLPPLFEESKIRSTMQKIFDFNVMKTKGGKMGAVNGMHPDGKVDDTCMQSREIWTGVTYAAAATMILSGMEEQGFTTAEGIFTAGWSEEGFGYWFQTPEGWTMDGHYRSLIYMRPLAIWGMQWALSLPKAILDAPQINMMDRVHLSPRSRRFSNNFKVVKHKAKCFGNSALSCSC

SEQ ID NO: 1067 - protein, 523 aa, Arabidopsis thaliana
MGGKNKIEILFQLQSALSRRRISSLVDFRRVFPPETPNHKNNITLSRFHFLGTHFLHSLGAPDKFPNRFNDDKDKQSALDVHNIIKHHRGSSPEKIKRILDKCGIDLTEELVLEVVNRNRSDWKPAYILSQLVVKQSVHLSSSMLYNEILDVLGKMRRFEEFHQVFDEMSKRDGFVNEKTYEVLLNRYAAAHKVDEAVGVFERRKEFGIDDDLVAFHGLLMWLCRYKHVEFAETLFCSRRREFGCDIKAMNMILNGWCVLGNVHEAKRFWKDIIASKCRPDVVSYGTMINALTKKGKLGKAMELYRAMWDTRRNPDVKICNNVIDALCFKKRIPEALEVFREISEKGPDPNVVTYNSLLKHLCKIRRTEKVWELVEEMELKGGSCSPNDVTFSYLLKYSQRSKDVDIVLERMAKNKCEMTSDLYNLMFRLYVQWDKEEKVREIWSEMERSGLGPDQRTYTIRIHGLHTKGKIGEALSYFQEMMSKGMVPEPRTEMLLNQNKTKPRVEDKMLRSNLTSEESESD

SEQ ID NO: 1068 - protein, 628 aa, Tulipa gesneriana
MGGRDLESSTPLLHHEPYSPRKTITTIVSSIVAAALLLSLITLLNTKHEADHHPPDVAFPMSRGVFEGVSEKSTASLIGSAARFPWTDAMLEWQRTGFHFQPEKNWMNDPDGPMFYKGWYHIFYQYNPVSAVWGNITWGHAVSRNLIHWFHLPIAFVPDQWYDANGALTGSATFLPDGRIAMLYTGITTEFVQVQCQVYPEDVDDPLLLKWFKSDANPILVPPPGIGSKDFRDPTTAWYDVAEASWKLAIGSKDEQHNGISLIYRTYDFVSYELLPILLHAVEGTGMWECVDFYPVLTNSTVGLDTSVPPGPGVRHVLKASLDDDKHDYYAIGTYDVVSGTWIPDDVEADVGIGWRYDYGKFYASKTFFDWAKGRRVLFGFTGETDSEQNNRLKGWASVLPIPRTILFDQKTGSNLLLWPVEEVERLRFNRQDFENIDIGIGAVVPLDIGRAIQLDIVAEFEIDGATLEASVEADLGYNCSTSGGTFGRGVLGPFGFLVLSDEDLSEQTAIYFYVGRKVDGALQTFFCQDELRSSKADDLVKRVFGSIVPVLHGEILTMRILLDHSIVESFAQGGRTCITSRIYPTKAFDGAARVFVFNNATGAKVTAKSIKIWQMKSASISPYPFKA

SEQ ID NO: 1069 - protein, 553 aa, Arabidopsis thaliana
MSYTTATADSDDGMHSSIHNESPAPDSISNGCRSRGKRSVLKKGPWTSTEDGILIDYVKKHGEGNWNAVQKHTSLARCGKSCRLRWANHLRPNLKKGAFSQEEEQLIVEMHAKMGNKWAQMAEHLPGRTDNEIKNYWNTRIKRRQRAGLPLYPPEIYVDDLHWSEEYTKSNIIRVDRRRRHQDFLQLGNSKDNVLFDDLNFAASLLPAASDLSDLVACNMLGTGASSSRYESYMPPILPSPKQIWESGSRFPMCSSNIKHEFQSPEHFQNTAVQKNPRSCSISPCDVDHHPYENQHSSHMMMVPDSHTVTYGMHPTSKPLFGAVKLELPSFQYSETSAFDQWKTTPSPPHSDLLDSVDAYIQSPPPSQVEESDCFSSCDTGLLDMLLHEAKIKTSAKHSLLMSSPQKSFSSTTCTTNVTQNVPRGSENLIKSGEYEDSQKYLGRSEITSPSQLSAGGFSSAFAGNVVKTEELDQVWEPKRVDITRPDVLLASSWLDQGCYGIVSDTSSMSDALALLGGDDIGNSYVTVGSSSGQAPRGVGSYGWTNMPPVWSL

SEQ ID NO: 1070 - protein, 756 aa, Abies magnifica
MWKLKIAEGGSPWLQTLNNHVGRQVWEFDPKAGTSEDHLAVEKARVDFYNKRFIQHHSADLLMRLQCGGENPLSPLPAQVKLESANDITEEVIQTTLVRAIRFYATIQAHDGHWPGDYGGPMFLMPGLVIALYVTGALNAVLSEMHKKEICRYLYNHQNEDGGWGLHIEGHSTMFGTVLNYVTLRLLGQAPDGGQGAMEKGCAWILDHGGATAIPSWGKMWLSVLGVFDWTGNNPLPPEMWLLPYFLPTHPGRMWCHCRMVYLPMSYIYGRRFVGPLTGIVMSLREELYTVPYEKIDWNQARSMCAKEDLYYPHPFLQDILWGTLHKVVEPALMHWPGSMLRERALQSVMKHIHYEDENTRYICIGPVNKVLNMLCCWVEDSNSEAFKRHLARVVDYLWVAEDGMKMQGYNGSQLWDTAFATQALISTNLLDDCGPLLKKAHIYIERSQVQEDCPGDLNFWYRHISNGAWPFSTRDHGWPISDCSSEGLKAALALSQLPQDIVGKPIPSQRIFDCVNLMLSMQNSDGGFATYELTRSYPWLEKINPAETFGDIVIDYSYVECTSAITQALVSFKKLYPEHRHKEIETCILKATRYIENIQRPDGSWYGSWGVCFTYGTWFGVLGLAAAGKTYQNCSNIRKACEFLLSKQLPSGGWGESYLSCQEKVYTHLEGGRSHIVSTAWAMLALIYAGQALRDPKPLHRAAIVLVNYQMENGDFPQQEIMGVFNRNCMISYSAYRNIFPIWALGEYCRHVLQS

SEQ ID NO: 1071 - protein, 498 aa, Calystegia sepium
MAPIPGVMPMGNYVPVYVMLPLGVVNSDNVFPDQDKVENELKQLKEAGCDGIMVDVWWGIIEAKGPKNYDWSAYKELFQLVRKCGLKIQAIMSFHQCGGNVGDAVFIPIPKWILQIGNNNPDIFYTNKAGNRNQEYLSLGVDNQSLFDGRTALEMYRDFMESFRDNMTNFLRAGDIVDIEVGCGAAGELRYPSYPETQGWVYPGIGEFQCYDKYMVADWKEANKQAGHANWEMPKNAGTYNDTPEKTEFFRLNGTYDSEFGKFFLTWYSNKLIIHGDQILEQANKVFVGFRANIAAKVSGIHWWYNDVSHAAELTAGFYNISGRDGYRPIARMLARHHTTLNFTCLEMRDSEQPAEAKSAPQELVQQVLSSGWKEFIDVAGENALPRFDATAYDQMLLNVRPNGVNLNGPPKLKMSGLTYLRLSDDLLLKDNFELFKKFVKKMHADLDASPNAISPPVLERSNSAIAIDELLEATKVSRAFPWYDVTDMPVDGSNPFD

SEQ ID NO: 1072 - protein, 211 aa, Aspergillus nidulans
VPFHVNTIKNASKSDEGEYAYLRINFLSPGQGVGRKDDQPFEDLSAHFLRNLTLRSKDNDRFAQVAQDITELRKNALRREQEKKEMEDVVEQDKLVEIRNRRPVKLPDVYLRPPLDGKRVPGEVEIHQNGLRYVSPFRNEHVDVLFSNVKHLFFQPCAHELIVLIHVHLKTPIMIGKRKTRDIQFYREATEMQFDETGNRRRKHRYGDEDE

SEQ ID NO: 1073 - protein, 173 aa, Neurospora crassa
VPFHINTIKNASKSDEGEWSFLRINFLSPGQGVGRKDEQPFEDASAHFVRSLTFKSTDGDRYADIANQISNLKRDAVKKEQEKKDMEDVVEQDKLVEIRNRRPAVLDNVFIRPAMEGKRVPGKVEIHQNGIRYQSPLSTTQRVDILFSNVRHLFFQPCQHELIVIIHIHLKDP

SEQ ID NO: 1074 - protein, 426 aa, Oryza sativa
MFADFSAAAMELGEVLGLQGLTVPSTKEGDLSLIKRAAAGSFTQAAAASYPSPFLDEQKMLRFAKAAHTLPSGLDFGRENEQRFLLSRTKRPFTPSQWMELEHQALIYKYLNAKAPIPSSLLISISKSFRSSANRMSWRPLYQGFPNADSDPEPGRCRRTDGKKWRCSKEAMADHKYCERHINRNRHRSRKPVENQSRKTVKETPCAGSLPSSVGQGSFKKAKVNEMKPRSISYWTDSLNRTMANKEKGNKAAEENNGPLLNLTNQQPTLSLFSQLKQQNKPEKFNTAGDSESISSNTMLKPWESSNQQNNKSIPFTKMHDRGCLQSVLQNFSLPKDEKMEFQKSKDSNVMTVPSTFYSSPEDPRVSCHAPNMAQMQEDSISSSWEMPQGGPLGEILTNSKNPDDSIMKPEARPYGWLLNLEDHAM

SEQ ID NO: 1075 - protein, 1090 aa, Oryza sativa; identical to SEQ ID NO: 798

SEQ ID NO: 1076 - protein, 1052 aa, Candida albicans
MSEVNIDAGLFYKRLSIFQKQLTANNIPQALIIVGARSDDNTYKKSTVLQNWLLGYEFIHTAIYITDKKCIFITSEGKSKHLKHLTNQKPDLVELWIRTKDVEHNKQLFIKLLETMTKLDSKYGKILKDKYDGKFIDEWNQILNDNNNNTTNDHALSAVDLAVTVSQALAVKDSEEFNNTKIASNASVVMMDTFVNDMMIIVDDEKKITNSQLTDQIEDKIENNKWYLKTKLGKNLLQSIKDFDPEYLEYCYSPIIQSGGDYDLKPSAVSTDKPLIGEGVILSSIGLRYKSYCSNIARTFLIDPTSEMETNYDFLLQLQKYIVDNLLKDGVPASKVYQDTIDYIKKERPDLVNHFTKNCGWLLGMEFRDSTFILNAKTTDRKLTTGQIISLTIGFNNLSNDKNDKNDNKTNHQKNKQTYALLLTDTIKITDDSSILLTNYSKDRAAISFSFNDDNETQKENNNNNNKRPGLSQTSNTTGLKLESTENTAILKSKLRHENTNADDANSEKLRQEIQIKLHEKRLQEGLARFSKADATDADDFKPIFKKYESYVRESQIPNSVNDLKIHIDYKNQTIILPISGRPVPFHINSYKSGSQNEEGDFTYLRLNFNSPGAGGNVTKKQELPYEDSPDNSFLRSITIRSRDRQRMVDVYKAIQDLKKDSVKREQEKKQMADVITQANLIELKGSRVKKLNNVFIRPTPDTKKIGGVLQIHENGLRYQSQPQSQSQSNFKNDQRVDVLFSNIKHLFFQPCKDELIVLIHCHLKNPIMIGKRKTFDVQFYREASDMAFDETGGRKRKYRYGDEDELQQEQEERRRKALLDKEFKGFAELIADSSHGMVDLDIPFRELGFQGVPFRSSVLCVPTRDCLVQLIDPPYLVVTLEEIEIAHLERVQFGLKNFDLVFVFKDFNKPVVHINTIPVELLEDVKSWLTDVDIPISEGQMNLNWVQIMKTVLADPYQFFIDGGWAFLTGQGESDEEEESDEESDFRVSDEDPQDEDEESDDYASEEESDDYSGSDDDGSGGGDDDDSESGEDWDALERKAAKADRNSGFD

SEQ ID NO: 1077 - protein, 585 aa, Halobacterium sp.
MSQAEAITDTGEIESVSGPVVTATGLDAQMNDVVYVGDEGLMGEVIEIEGDVTTIQVYEETSGIGPGQPVDNTGEPLTVDLGPGMLDSIYDGVQRPLDVLEDEMGAFLDRGVDAPGIDLDTDWEFEPTVEAGDEVAAGDVVGTVDETVSIEHKVLVPPRSDGGEVVAVESGTFTVDDTVVELDTGEEIQMHQEWPVRRQRPTVDKQTPTEPLVSGQRILDGLFPIAKGGTAAIPGPFGSGKTVTQQSLAKFADADIVVYIGCGERGNEMTEVIEDFPELPDPQTGNPLMARTTLIANTSNMPVAARESCIYTGITIAEYYRDMGYDVALMADSTSRWAEAMREISSRLEEMPGEEGYPAYLAARLSEFYERAGYFENFNGTEGSISVIGAVSPPGGDFSEPVTQNTLRIVKTFWALDSDLAERRHFPAINWDESYSLYKDQLDPWFTDNVVDDWAEQRQWAVDILDEESELEEIVQLVGKDALPEDQQLTLEVARYIREAWLQQNALHDVDRYCPPEKTYAILSGIKTLHEESFEALDAGVPVEEITSIDAAPRLNRLGTTPDDEHEAEVAEIKQQITEQLRELY

SEQ ID NO: 1078 - protein, 163 aa, Dunaliella tertiolecta
ASAQQPLNQQAPPPPTSFASQLQHTLGQQQFCDPTLIDRGLQHADKRRRDWIDVDALNEDDTQACSAYAVPIFEHLREAELVRRPNALYPEAFQTDVNAKMRAILVDWLVEVAEEYKLCADTLYLSVNYIDRFLSIHPVQRSNLQLVGIACMWIASKYEEIYP

SEQ ID NO: 1079 - protein, 120 aa, Sonchus oleraceus
ENDNVVGHDTKYNCHLMEKIEKENLLHRAFSVFLFNSKYELLLQQRSATKVTFPLVWTNTCCSHPLYRESELIAEKTLGVRNAAQRKLLDELGIPAEDVPVDEFTPLGRMLDKAPSDGKW

SEQ ID NO: 1080 - protein, 121 aa, Lactuca indica
ENDNVLGHDTKYNCHLMEKIEKDNLLHRAFSVFLFNSKYGITPSAKVRNQGDISFGMDQHLLQPSTIQRIRVNSRKCPWGQEMLHRGKLLDELGIPAEDVPVDEFTTLGRMLYKAPSDGKW

SEQ ID NO: 1081 - protein, 476 aa, Arabidopsis thaliana
MVVQNVQDLDVLPKHSSDSFDDDGRPKRTGTVWTASAHIITAVIGSGVLSLAWAVAQIGWIGGPVAMLLFSFVTFYTSTLLCSCYRSGDSVTGKRNYTYMDAIHSNLGGIKVKVCGVVQYVNLFGTAIGYTIASAISLVTSCQQMNGPNDPCHVNGNVYMIAFGIVQIIFSQIPDFDQLWWLSIVAAVMSFAYSAIGLGLGVSKVVENKEIKGSLTGVTVGTVTLSGTVTSSQKIWRTFQSLGNIAFAYSYSMILIEIQDTVKSPPAEVNTMRKATFVSVAVTTVFYMLCGCVGYAAFGDNAPGNLLAHGGFRNPYWLLDIANLAIVIHLVGAYQVYCQPLFAFVEKEASRRFPESEFVTKEIKIQLFPGKPFNLNLFRLVWRTFFVMTTTLISMLMPFFNDVVGLLGAIGFWPLTVYFPVEMYIAQKNVPRWGTKWVCLQVLSVTCLFVSVAAAAGSVIGIVSDLKVYKPFQSEF

SEQ ID NO: 1082 - protein, 2062 aa, Arabidopsis thaliana
MSGLFHVVRSQNRTTATTDPDEARALNKIFRTWKITATKAWNISGELCSGAAIDDSVSIDNLAFNPLIKCDCSFVDSTICRIVALRARGMDVAGPIPDDLWTLVYISNLNLNQNFLTGPLSPGIGNLTRMQWMTFGANALSGPVPKEIGLLTDLRSLAIDMNNFSGSLPPEIGNCTRLVKMYIGSSGLSGEIPSSFANFVNLEEAWINDIRLTGQIPDFIGNWTKLTTLRILGTSLSGPIPSTFANLISLTELRLGEISNISSSLQFIREMKSISVLVLRNNNLTGTIPSNIGDYLGLRQLDLSFNKLTGQIPAPLFNSRQLTHLFLGNNRLNGSLPTQKSPSLSNIDVSYNDLTGDLPSWVRLPNLQLNLIANHFTVGGLYPDWTASRRISAAIEEKEYVSASKWSSSGALYEKDEGALGPATFFVSKTQRWAVSNVGLFTGSNSNQYIALSATQFANTSDSELFQSARLSASSLRYYGLGLENGGYSVTVQFAEIQIQGSNTWKSLGRRIFDIYVQGKLVEKDFDMQKAANGSSIRVIQRVYKANVSENYLEVHLFWAGKGTCCIPAQGTYGPLVSAISATPDFIPTVKNKLPSKSKKNIVIIVGAIVGAGMLCILVIAILLFIRRKRKRAADEEVLNSLHIRPYTFSYSELRTATQDFDPSNKLGEGGFGPVFKGKLNDGREIAVKQLSVASRQGKGQFVAEIATISAVQHRNLVKLYGCCIEGNQRMLVYEYLSNKSLDQALFEEKSLQLGWSQRFEICLGVAKGLAYMHEESNPRIVHRDVKASNILLDSDLVPKLSDFGLAKLYDDKKTHISTRVAGTIGYLSPEYVMLGHLTEKTDVFAFGIVALEIVSGRPNSSPELDDDKQYLLEWAWSLHQEQRDMEVVDPDLTEFDKEEVKRVIGVAFLCTQTDHAIRPTMSRVVGMLTGDVEITEANAKPGYVSERTFENAMSFMSGSTSSSWILPETPKDSSKSQSKGGDASCTRRQQPPLLKSPVDNAAESRFKRVHFTACGCIALWRYLCLLLTVWFLCNFGPVYVVRAQNRTGATTHPDEGLSSSSLNNLTSSNSIDRIEDCVARIRAPREWNISGELCSGAAIDASVLDSNPAYNPLIKCDCSFENSTICRITNIKVYAMEVVGSIPQQLWTLEYLTNLNLGQNVLTGSLPPALGNLTRMRWMTFGINALSGPIPKEIGLLTDLRLLSISSNNFSGSIPDEIGRCTKLQQIYIDSSGLSGGLPVSFANLVELEQAWIADMELTGQIPDFIGDWTKLTTLRILGTGLSGPIPASFSNLTSLTELRLGDISNGNSSLEFIKDMKSLSILVLRNNNLTGTIPSNIGEYSSLRQLDLSFNKLHGTIPASLFNLRQLTHLFLGNNTLNGSLPTQKGQSLSNVDVSYNDLSGSLPSWVSLPNLNLNLVANNFTLEGLDNRVLSGLNCLQKNFPCNRGKGIYSDFSINCGGPEIRSVTEAVFEREDEDLGPASFVVSAGQRWAASSVGLFAGSSNNIYISTSQSQFVNTLDSELFQSARLSASSLRYYGLGLENGGYTVTLQFAEIQILGSTSNTWRGLGRRRFDIYVQGRLVEKDFDVRRTAGDSTVRAVQREYKANVSQNHLEIHLFWAGKGTCCIPIQGAYGPLISAVGATPDFTPTVGNRPPSKGKSMTGTIVGVIVGVGLLSIISGVVIFIIRKRRKRYTDDEEILSMDVKPYTFTYSELKSATQDFDPSNKLGEGGFGPVYKGKLNDGREVAVKLLSVGSRQGKGQFVAEIVAISAVQHRNLVKLYGCCYEGEHRLLVYEYLPNGSLDQALFGEKTLHLDWSTRYEICLGVARGLVYLHEEARLRIVHRDVKASNILLDSKLVPKVSDFGLAKLYDDKKTHISTRVAGTIGYLAPEYAMRGHLTEKTDVYAFGVVALELVSGRPNSDENLEDEKRYLLEWAWNLHEKGREVELIDHQLTEFNMEEGKRMIGIALLCTQTSHALRPPMSRVVAMLSGDVEVSDVTSKPGYLTDWRFDDTTASSISGFPLRNTQASESFTSFVAPRSEISPRNNDARPMLGAQMNEGR

SEQ ID NO: 1083 - protein, 1088 aa, Arabidopsis thaliana
MAHSVCFDPAVTANLSLSAFHATVRFSEISVIPLNLSNFLEEALEVGLLKNQIFCSGFNRRRLVLGSVTQKAALETMEEVQPPVTPPIEPNGKRSEASLLDICEKVLSLDGSTCDEALKLFTETKRILSASMSNIGSGTREEVERFWFAFILYSVKRLSVRKEADGLSVSGDNEFNLCQILRALKLNIVDFFKELPQFVVKAGSVLGELYGADWENRLQAKEVQANFVHLSLLSKYYKRGFREFFLTYDANAEKNSANSSTYLLDSYRFGWLLFLALRNHAFSRFKDLVTCSNGVVSILAILIIHVPCRFRNFSIQDSSRFVKKGDKGVDLVASLCKIYDASEDELRIVIDKANNLVETILKKKPSPASECQTDKLDNIDPDGLTYFEDLLEETSISTSLITLEKDYYDGKGELDERVFINEEDSLLGSGSLSAGAVNITGVKRKIDALSSPARTFISPLSPHKSPAAKTNGISGATKLAATPVSTAMTTAKWLRTVISPLLPKPSPGLEHFLKSCDRDITNDVTRRAHIILEAIFPNSSLGAQCGGGSLQAVDLMDDIWAEQRRLEACKLYYRVLEAMCKAEAQILHANNLNSLLTNERFHRCMLACSAELVLATHKTITMLFPAVLERTGITAFDLSKVIESFIRHEDSLPRELRRHLNSLEERLLESMVWEKGSSMYNSLIVARPSLALEINQLGLLAEPMPSLDAIAALINFSDGANHASSVQKHETCPGQNGGIRSPKRLCTDYRSILVERNSFTSPVKDRLLALGNVKSKMLPPPLQSAFASPTRPNPGGGGETCAETGINIFFTKINKLAAVRINGMVERLQLSQQIRESVYCFFQHVLAQRTSLLFSRHIDQIILCCFYGVAKISQMSLTFREIIYNYRKQPQCKPLVFRSVYVDALQCRRQGRIGPDHVDIITFYNEIFIPAVKPLLVELGPVRNDRAVEANNKPEGQCPGSPKVSVFPSVPDMSPKKVSAVHNVYVSPLRGSKMDALISHSTKSYYACVGESTHAYQSPSKDLSAINNRLNNSSNRKRTLNFDAEAGMVSDSMVANSLNLQNQNQNQNGSDASSSGGAAPLKTEPTDS

SEQ ID NO: 1084 - protein, 670 aa, Arabidopsis thaliana
MSGLWRLRNLKSLALHARSISPVSNLYSLELGSCPRRRIQERFKSEQGGGGGGGDDFPVPVTRRKLRAEPNCPRCSKQMDLLFSNRQFPSSNLLQRPDDSDSSGAGDKTNFQSVNFCPTCKTAYGFNPRGVSPLQGTFIEIGRVQSPTTTTTNATTSKSTRKQQQHSKDPNQGFNYRNKLRSSFWDTLRSYGAEPPEDWSPPPPHSPLNSSPPNTIPVNASPSAVDTSPLPDAVNDVSRWGGAGLGRDFPTPKEICKWLDKFVIGQSRAKKVLSVAVYNHYKRIYHTSMKKGLLHDSDALSPFNPLWFTLILWTLNPRSAAQPIDDDDNVELDKSNVLLMGPTGSGKTLLAKTLARLVNVPFVIADATTLTQAGYVGDDVESILHKLLTVAEFNVQAAQQGIVYIDEVDKITKKAESLNISRDVSGEGVQQALLKLLEGTIVNVPGKGARKHPRGDHIQIDTKDILFICGGAFVDLEKTIVDRRQDSSIGFGAPVRANMATSGVTSGAITSSLLESVESADLTAYGLIPEFVGRFPILVSLSALTEDQLIRVLVEPKNALGKQYKKLFSMNNVKLHFTEKALEIISKQAMVKNTGARGLRALLESILTEAMFEIPDDKKGDERIDAVIVDEESTSSEASRGCTAKILRGDGAFERYLSENKSKDATEPMV

SEQ ID NO: 1085 - protein, 650 aa, Arabidopsis thaliana
MSGLWRLRNLKSLALHARSISPVSNLYSLELGSCPRRRIQERFKSEQGGGGGGGDDFPVPVTRRKLRAEPNCPRCSKQMDLLFSNRQFPSSNLLQRPDDSDSSGAGDKTNFQSVNFCPTCKTAYGFNPRGVSPLQGTFIEIGRVQSPTTTTTNATTSKSTRKQQQHSKDPNQGFNYRNKLRSSFWDTLRSYGAEPPEDWSPPPPHSPLNSSPPNTIPVNASPSAVDTSPLPDAVNDVSRWGGAGLGRDFPTPKEICKWLDKFVIGQSRAKKVLSVAVYNHYKRIYHTSMKKGLVLSLIHSAQPIDDDDNVELDKSNVLLMGPTGSGKTLLAKTLARLVNVPFVIADATTLTQAGYVGDDVESILHKLLTVAEFNVQAAQQGIVYIDEVDKITKKAESLNISRDVSGEGVQQALLKLLEGTIVNVPGKGARKHPRGDHIQIDTKDILFICGGAFVDLEKTIVDRRQDSSIGFGAPVRANMATSGVTSGAITSSLLESVESADLTAYGLIPEFVGRFPILVSLSALTEDQLIRVLVEPKNALGKQYKKLFSMNNVKLHFTEKALEIISKQAMVKNTGARGLRALLESILTEAMFEIPDDKKGDERIDAVIVDEESTSSEASRGCTAKILRGDGAFERYLSENKSKDATEPMV

SEQ ID NO: 1086 - protein, 504 aa, Oryza sativa
MQPPILLPLLLLLLLLAAASPRPVLSRRHASPPLATETLDVAASLSRARAAVSAEAVPLHQSAAAAVSTEVVGEEHEEGRLALRLHSRDFLPEEQGRQRHASYRSLVLARLRRDSARAAAVSARAAMAADGVSRFDLVPANVTAFEASAAEIQGPVVSGVGLGSGEYFSRVGVGSPARQLYMVLDTGSDVTWVQCQPCADCYQQSDPVFDPSLSTSYASVACDNPRCHDLDAAACRNSTGACLYEVAYGDGSYTVGDFATETLTLGDSAPVSSVAIGCGHDNEGLFVGAAGLLALGGGPLSFPSQISATTFSYCLVDRDSPSSSTLQFGDAADAEVTAPLIRSPRTSTFYYVGLSGLSVGGQILSIPPSAFAMDSTGAGGVIVDSGTAVTRLQSSAYAALRDAFVRGTQSLPRTSGVSLFDTCYDLSDRTSVEVPAVSLRFAGGGELRLPAKNYLIPVDGAGTYCLAFAPTNAAVSIIGNVQQQGTRVSFDTAKSTVGFTTNKC

SEQ ID NO: 1087 - protein, 294 aa, Brassica napus
MDQYEKVEKIGEGTYGVVYKARDKVTNETIALKKIRLEQEDEGVPSTAIREISLLKEMQHSNIVKLQDVVHSEKRLYLVFEYLDLDLKKHMDSSPDFSKDLHMIKRYVYQILRGIAYCHSHRVLHRDLKPQNLLIDRRTNSLKLADFGLARAFGIPVRTFTHEVVTLWYRAPEILLGSHHYSTPVDIWSVGCIFAEMISQKPLFPGDSEIDQLFKIFRIMGTPTEDTWPGVTSLPDYKSAFPKWKPTDLESFVPNLDPNGIDLLSKMLLMDPTKRINARAALEHDYFKDIGVMP

SEQ ID NO: 1088 - protein, 452 aa, Medicago sativa
MKEVAPGTQDQKQPLRANSKRALSDVTYLPHKKRAILQDVTNNCGENTKRSCLNPTEIQAKKRKVAKPAQPNVSNEVPSAAELPPFIADSKPVSSMEMRLRSSEDFRCLDDLEDNAPFRMSSNQCGTNNNLLQSQTSRISARPSSSQKKASQIVAAKKANISELLDVSKHPDVADIDADFEDPQLCSHYAADIYDHLRVAELSRRPYPNFMETVQQDITPSMRAILVDWLVEVSEGYKLQANTLYLAVYLIDWFLSKNCIEKERLQLLGITCMLIASKYEEINAPRIEDFCFITDNTYTKEEVVKLESLVLKSSSYQLFAPTTKTFLRRFLRAAQASYKRPSIELEYLTNYLAELTLLNYGFLNFLPSMIAASAVFLARWTLDQSSHPWNPTLEHYASYKASDLKATVLALQDLQLNSNDDCPLTAIRKKYTQDKLNCVAALSSPKLLETLF

SEQ ID NO: 1089 - protein, 642 aa, Xanthomonas campestris
MGKIIGIDLGTTNSCVAIMDGGKARVIENSEGDRTTPSIVAYTKDGEVLVGASAKRQAVTNPKNTFYAVKRLIGRKFTDGEVQKDISHVPYGILAHDNGDAWVQTSDSKRMAPQEISARVLEKMKKTAEDFLGEKVTEAVITVPAYFNDSQRQATKDAGRIAGLDVKRIINEPTAAALAYGLDKNGGDRKIAVYDLGGGTFDVSIIEIAEVDGEKQFEVLATNGDTFLGGEDFDNRVIEYLVDEFNKDQGIDLRKDPLALQRLKDAAERAKIELSTSQQTEVNLPYVTADASGPKHLNIKLTRAKLEALVEDLVKKSIEPCRTALNDAGLRASDINEVILVGGQTRMPKVQQAVADFFGKEPRKDVNPDEAVAVGAAIQGGVLAGDVKDVLLLDVTALSLGIETMGGVFTKIIEKNTTIPTKASQTFSTAEDNQSAVTVHVLQGEREQARFNKSLAKFDLSGIEPAPRGMPQVEVSFDIDANGILHVSAKDKKTNKEQKVEIKAGSGLSDEEIQRMVADAEANREEDKKFQELVQTRNQADGLIHATRTAITEHGSKVGGDVIGKVEAALADLETAMKGDDKAQIEARSKTLEEAGQSLYAAAAAAEQGGNADAASGNAQASKAADDVVDAEFTEVKDDKKA

SEQ ID NO: 1090 - protein, 526 aa, Emericella nidulans
MAASSSLDHLSNRMKLEWHSKLNTEMVPAKNFRRTSIICTIGPKTNSVEKINALRRAGLNVVRMNFSHGSYEYHQSVIDHAREAEKQAAGRPVAIALDTKGPEIRTGNTVGDKDIPIKAGHEMNISTDEQYATASDDQNMYVDYKNITKVISAGKLIYVDDGILSFEVLEVVDDKTLRVRCLNNGNISSRKGVNLPGTDVDLPALSEKDISDLKFGVKNKVDMVFASFIRRGSDIRHIREVLGEEGREIQIIAKIENQQGVNNFDEILEETDGVMVARGDLGIEIPAPKVFIAQKMMIAKCNIKGKPVICATQMLESMTYNPRPTRAEVSDVANAVLDGADCVMLSGETAKGNYPCEAVTMMSETCLLAEVAIPHFNVFDELRNLAPRPTDTVESIAMAAVSASLELNAGAIVVLTTSGNTARMISKYRPVCPIIMVSRNPAATRYSHLYRGVWPFYFPEKKPDFNVKIWQEDVDRRLKWGINHGLKLGIINKGDNIVCVQGWRGGMGHTNTVRVVPAEENLGLSE

SEQ ID NO: 1091 - protein, 585 aa, Desulfurococcus sp.
MGRIIRVTGPLVVADGMKGSKMYEVVRVGEMGLIGEIIRLEGDKAVIQVYEETAGIRPGEPVEGTGSSLSVELGPGLLTSMYDGIQRPLEKLRELSGDFIARGLTAPALPRDKKWHFTPTVKVGDKVTGGDILGVVPETSIIEHKILVPPWVEGEIVEIAEEGDYTVEEVIAKVKKPDGSIEELKMYHKWPVRVKRPYKNKLPPEVPLITGQRTIDTFFSIAKGGTAAIPGPFGSGKTVTQHQLAKWSDAQVVVYIGCGERGNEMTDVLEEFPKLKDPKTGKPLMERTVLIANTSNMPVAAREASIYTGITIAEYFRDQGYDVALMADSTSRWAEALREISGRLEEMPGEEGYPAYLASKIAEFYERAGRVVTLGSEPRVGSVSVIGAVSPPGGDFSEPVVQNTLRVVKVFWALDADLARRRHFPAINWLRSYSLYLDSIQDWWHKNVDPEWRKMRDTAMALLQKEAELQEIVRIVGPDALPDREKAILIVTRMLREDYLQQDAFDEVDTYCPPKKQVTMMRVILNFYERTMEAVDRGVPVDEIAKLPVREKIGRMKFEPDIEKIRALIDETNEQFEELFKKYGA

SEQ ID NO: 1092 - protein, 964 aa, Pyrococcus horikoshii
MVAKGRIIRVTGPLVVADGMKGAKMYEVVRVGELGLIGEIIRLEGDKAVIQVYEETAGVRPGEPVVGTGASLSVELGPGLLTSIYDGIQRPLEVIREKTGDFIARGVTAPALPRDKKWHFIPKAKVGDKVVGGDIIGEVPETSIIVHKIMVPPGIEGEIVEIAEEGDYTIEEVIAKVKTPSGEIKELKMYQRWPVRVKRPYKEKLPPEVPLITGQRVIDTFFPQAKGGTAAIPGPFGSGKCVDGDTLVLTKEFGLIKIKELYEKLDGKGRKIVEGNEEWTELEKPITVYGYKDGKIVEIKATHVYKGVSSGMVEIRTRTGRKIKVTPIHRLFTGRVTKDGLILKEVMAMHVKPGDRIAVVKKIDGGEYIKLDSSNVGEIKVPEILNEELAEFLGYLMANGTLKSGIIEIYCDDESLLERVNSLSLKLFGVGGRIVQKVDGKALVIQSKPLVDVLRRLGVPEDKKVENWKVPRELLLSPSNVVRAFVNAYIKGKEEVEITLASEEGAYELSYLFAKLGIYVTISKSGEYYKVRVSRRGNLDTIPVEVNGMPKVLPYEDFRKFAKSIGLEEVAENHLQHIIFDEVIDVRYIPEPQEVYDVTTETHNFVGGNMPTLLHNTVTQHQLAKWSDAQVVIYIGCGERGNEMTDVLEEFPKLKDPKTGKPLMERTVLIANTSNMPVAAREASIYTGITIAEYFRDMGYDVALMADSTSRWAEALREISGRLEEMPGEEGYPAYLASKLAEFYERAGRVVTLGSDYRVGSVSVIGAVSPPGGDFSEPVVQNTLRVVKVFWALDADLARRRHFPAINWLTSYSLYVDAVKDWWHKNIDPEWKAMRDKAMALLQKESELQEIVRIVGPDALPERERAILLVARMLREDYLQQDAFDEVDTYCPPEKQVTMMRVLLNFYDKTMEAINRGVPLEEIAKLPVREEIGRMKFERDVSKIRSLIDKTNEQFEELFKKYGA

SEQ ID NO: 1093 - protein, 585 aa, Thermus thermophilus
MIQGVIQKIAGPAVIAKGMLGARMYDICKVGEEGLVGEIIRLDGDTAFVQVYEDTSGLKVGEPVVSTGLPLAVELGPGMLNGIYDGIQRPLERIREKTGIYITRGVVVHALDREKKWAWTPMVKPGDEVRGGMVLGTVPEFGFTHKILVPPDVRGRVKEVKPAGEYTVEEPVVVLEDGTELKMYHTWPVRRARPVQRKLDPNTPFLTGMRILDVLFPVAMGGTAAIPGPFGSGKTVTQQSLAKWSNADVVVYVGCGERGNEMTDVLVEFPELTDPKTGGPLMHRTVLIANTSNMPVAAREASIYVGVTIAEYFRDQGFSVALMADSTSRWAEALREISSRLEEMPAEEGYPPYLAARLAAFYERAGKVITLGGEEGAVTIVGAVSPPGGDMSEPVTQSTLRIVGAFWRLDASLAFRRHFPAINWNGSYSLFTSALDPWYRENVAEDYPELRDAISELLQREAGLQEIVQLVGPDALQDAERLVIEVGRIIREDFLQQNAYHEVDAYCSMKKAYGIMKMILAFYKEAEAAIKRGVSIDEILQLPVLERIGRARYVSEEEFPAYFEEAMKEIQGAFKAGLKGERWTF

SEQ ID NO: 1094 - protein, 582 aa, Deinococcus radiodurans
MTQQKQGVVQSIAGPAVIAKGMYGAKMYDIVRVGQERLVGEIIRLDGDTAFVQVYEDTAGLTVGEPVETTGLPLSVELGPGMLNGIYDGIQRPLDKIREASGNFIARGIEVSSLNREQKWDFTPSVQAGDTVTGSGILGTVPEFSFTHKILVPPEVQGRLRSVAPAGQYTIDDTIAELEDGTKLRLAHYWPVRAPRPVQKKLDPSLPFLTGMRILDVMFPLVMGGAAAIPGPFGSGKTVTQQSVAKYGNADIVVYVGCGERGNEMTDVLVEFPELEDPKTGGPLMHRTILIANTSNMPVAAREASVYTGVTLAEYFRDQGYSVSLMADSTSRWAEALREISSRLEEMPAEEGYPPYLGAKLAAFYERAGAVKTLAGEDGAVSVIGAVSPAGGDMSEPVTQATLRITGAFWRLDAGLARRRHFPAINWNGSYSLFTPILDKWYRENVGPDFPELRQRIGSLLQQEAALQEVVQLVGPDALQDNERLIIETGRMLRQDFLQQNGFDPVDASASMPKNYGLMKMFLKFYDEAEAALRNGLTIDEIIQNPVIEKLARARYTPENEFMAYGEGVMDELDQTFKAVKA

SEQ ID NO: 1095 - protein, 623 aa, Citrus unshiu
MPSVYGARLTTFEDEEKESEYGYVRKVSGPVVIADGMNGAAMYELVRVGHDNLIGEIIRLEGDSATIQVYEETAGLMVNDPVLRTHKPLSVELGPGILGNIFDGIQRPLKTIAIRSGDVYIPRGVSVPALDKDTLWEFQPKKIGEGDLLTGGDLYATVFENSLMQHHVALPPDAMGKVTYVAPAGQYSLKDTVLELEFQGVKKSFTMLQAWPVRTPRPVSSKLAADTPLLTGQRVLDALFPSVLGGTCAIPGAFGCGKTVISQALSKYSNSDTVVYVGCGERGNEMAEVLMDFPQLTMTLPDGREESVMKRTTLVANTSNMPVAAREASIYTGITIAEYFRDMGYNVSMMADSTSRWAEALREISGRLAEMPADSGYPAYLAARLASFYERAGKVKCLGGPERTGSVTIVGAVSPPGGDFSDPVTSATLSIVQVFWGLDKKLAQRKHFPSVNWLISYSKYSTALESFYEQFDPDFINIRTKAREVLQREDDLNEIVQLVGKDALAEGDKITLETAKLLREDYLAQNAFTPYDKFCPFYKSVWMMRNIIHFYNLANQAVEKGAGMDGQKITYTLIKHRLGDLFYRLVSQKFEDPAEGEPALVAKFKKLHEDLTAGFRALEDETR

SEQ ID NO: 1096 - protein, 592 aa, Sulfolobus solfataricus
MDNGRIVRINGPLVVADNMRNAQMYEVVEVGEPRLIGEITRIEGDRAFIQVYEDTSGIKPNEPVYRTGAPLSIELGPGLIGKIFDGLQRPLDSIKELTKSPFIARGIKVPSIDRKTKWHFVPKVKKGDKVEGGSIIGIVNETPLVEHRILVPPYVHGTLKEVVAEGDYTVEDPIAIVDMNGDEVPVKLMQKWPVRIPRPFKEKLEPTEPLLTGTRVLDTIFPIAKGGTAAIPGPFGSGKTVTLQSLAKWSAAKIVIYVGCGERGNEMTDELRQFPSLKDPWTGRPLLERTILVANTSNMPVAAREASIYVGITMAEYFRDQGYDTLLVADSTSRWAEALRDLGGRMEEMPAEEGFPSYLPSRLAEYYERAGRVKTIGNPERFGSVTVASAVSPPGGDFTEPVTSQTLRFVKVFWPLDVSLAQARHYPAINWLQGFSAYVDLVANWWNTNVDPKWREMRDMMVRTLIREDELRQIVRLVGPESLAEKDKLILETARLIKEAFLKQNAYDDIDAFSSPQKQARIMRLIYLFNTYASKLVERGIPTKKIVDSMGQLLPEIIRSKAAIKNDELNRYDELERKLITVFENLEKEAGT

SEQ ID NO: 1097 - protein, 587 aa, Methanocaldococcus jannaschii
MPVVGKIIKIAGPVVVAEGMKGAQMYEVVKVGEEKLTGEIIQLHDDKAVIQVYEETSGIKPGEPVVGTGAPLSVELGPGMLRAMYDGIQRPLTAIEEKTGSIFIPRGVDVPALPRDIKWEFKPVVNEGDYVEEGDIIGTVDETPSIVHKILVPIGVKGKIVEIKEGKFTVEETVAVVETENGERKEITMMQKWPVRKPRPYKEKLPPEIPLITGQRVEDTFFTLAKGGTAAIPGPFGSGKTVTQHQLAKWSDADVVVYIGCGERGNEMTEVIEEFPHLEDIRTGNKLMDRTVLIANTSNMPVAAREASVYTGITIAEYFRDMGYGVLLTADSTSRWAEAMREISGRLEEMPGEEGYPAYLASRLAQFYERAGRVITLGKDNRQGFVCIVGAVSPPGGDFSEPVTSNTLRIVKVFWALDANLARRRHFPAINWLQSYSLYIDDVTEWWNTNTGPDWRQLRDEAMSLLQKEAELQEIVQLVGPDALPDRERVILEVARMLREDFLQQDAFDEVDTYCPPMKQYLMLKIIMTFYQEALKAVERGVEPAKILGVSVKQDIARMKYIPHDEFINVKSKEIMEKIKNELGSLN

SEQ ID NO: 1098 - protein, 646 aa, Arabidopsis thaliana
MESSGLDGVVFMRMITFSLKVFLFAGIIGVFVLLPVNCFGDQLTVIDYADWSANSLDLFSVANLKVRSQWLWVHFGAIYLVTVFVCCLLYFEFRYIALKRIEHFYSSKPKPEQFTILVRNIPSSDGSSVSDTVDRFFGENHSSTYFSHVVIHRTSKLRSVVVSLEKAYLPSDKAKKLYKEVKHKKPVKKTPMRFFSRKDNTEGHYESVLQEMEQNIRLGQAEVSAPGKEVRAAFVSFKSRYGAATALHMPQSINPTYWLTEPAPEPHDVHWPFFSASFMQKWLAKILVVFACLLLTILFLVPVVLVQGLTNLPALEFMFPFLSLILSMKVVSQIITGYLPSLILQTSLKVVPPTMEFLSSIQGHICHSDIQKSACNKVIWFTIWNVFFATVFSGSAFYKLSVILDPKQIPLKLAVAVPAQASFFIAYVVTTGWTDTLTELFRVVPFMVSYIKRSFEPSDENEFVVPPMRYHRDTPRVLFFGLLGITYFFLAPLILPFILLYFILAYIIYRNQFMNVYAPKFDTGGMFWPMIHYTMIFSLVLMQAIAIGLFALKKMELATYLLVPLPVFTLLFNEFCRKRFMPIFTDYPAEVLTKRDKEDRNDPTMPEFYNNLVSAYKDPALLPLRFSGSGSRNDSLTSPLLSFSEV

SEQ ID NO: 1099 - protein, 544 aa, Oryza sativa
MALTLRSSTSFLSPLDPSSKREDAPPCCVVPMPAPGSGGRLRLARAAPVEHATMEEMASPEAATLLHHGGGGGQGQRRGKGTAVYVMLPLETVGAGGKVARARALAASLAALRSGGVEGVMVDVWWGVVEREGPRRYDWEGYGELVRMVERAGLRLQMVMSFHQCGGNVGDSCNIPLPGWVLEEMKSNPDIVYTDRSGRRNPEYISLGCDTLPVLKGRTPIQVYSDYMRSFRDTFCGYLGNTIVEIQVGLGPCGELRYPSYPEANGTWRFPGIGEFQCYDKYMRASLQQAAAAAGHEEWGRGGPHDAGEYKQFPEETGFFRRDGTWCTEYGDFFLGWYSGMLLEHGDRVLAAAEAVFRGTGAALSAKVAGIHWHYRTRSHAAELTAGYYNTRRRDGYAPVAAMLARRGAVLNFTCMEMRDEQQPEHAGCSPEQLVRQVRSAARAARVGLAGENALERYDEAAFAQVVATAASAGLGAFTYLRMNKKLFDGDNWRQFVSFVRAMADGGERAALPSCDTEQSDLYVGFLEKRAAPEAEAAAAAAVV

SEQ ID NO: 1100 - protein, 603 aa, Bradyrhizobium sp.
MGKVIGIDLGTTNSCVAVMDGKNAKVIENSEGMRTTPSIVAVTDDGERLVGQPAKRQAVTNPERTFFAVKRLIGRRYDDPMVEKDKKLVPYKIVKASNGDAWVEADGQTYSPSQVSAFILQKMKETAEAHLGQKVDQAVITVPAYFNDAQRQATKDAGKIAGLEVLRIINEPTAAALAYGLDKTKTGTIAVYDLGGGTFDISILEIGDGVFEVKSTNGDTFLGGEDFDMRLVGYLADEFQKEQGINLRNDKLALQRLKEAAEKAKIELSSTTQTEINLPFITADQTGPKHLTMKLTRAKFEALVDDLVQKTVEPCRKALKDAGVTAGEIGEVVLVGGMSRMPKVQEVVKQLFGKEPHKGVNPDEVVAIGAAIQAGVLQGDVKDVLLLDVTPLSLGIETLGGVFTRIIDRNTTIPTKKSQVFSTAEDNQNAVTIRVFQGEREMAADNKMLGQFDLMGIPPAPRGMPQIEVTFDIDANGIVNVSAKDKATAKEQQIRIQASGGLSEADIEKMVKDAEANAEADKKRREAVTAKNEADGLVHSTEKALAEHGSKVGEPERRAIEDAVSDLKEALKGDDAEAIKAKTQTLAQASMKLGEAMYKQQAE

SEQ ID NO: 1101 - protein, 635 aa, Vibrio cholerae
MGKIIGIDLGTTNSCVAVLDGDKPRVIENAEGERTTPSVIAYTDGETLVGQPAKRQAVTNPQNTLFAIKRLIGRRFEDEEVQRDIKIMPYKIVKADNGDAWVEAKGQKMAAPQVSAEVLKKMKKTAEDFLGEPVTAAVITVPAYFNDAQRQATKDAGRIAGLEVKRIINEPTAAALAYGLDKQGGDRTIAVYDLGGGTFDISIIEIDEVEGEKTFEVLSTNGDTHLGGEDFDNRMINYLVDEFKKDQGIDLRNDPLAMQRLKEAAEKAKIELSSAQQTDVNLPYITADATGPKHMNIKVTRAKLEALVEDLVQRSLEPLKVALADADLSVNDITDVILVGGQTRMPMVQKKVAEFFGKEPRKDVNPDEAVAVGAAVQGGVLAGEVKDVLLLDVTPLSLGIETMGGVMTKLIEKNTTIPTKANQVFSTAEDNQSAVTIHVLQGERKQAMYNKSLGQFNLEGINPAPRGMPQIEVIFDLDADGILHVSAKDKQTGKEQKITIQASGGLSDAEIEKMVQEAEANKEADKKFEELATARNQADQMIHATRKQITEAGEALPADEKAKIETAINELETAKKGEDKAEIDAKVQALMAAAQKLMEIAQQQAQAQGANAGQSSAKEDDVVDAEFEEVNDDKK

SEQ ID NO: 1102 - protein, 775 aa, Neurospora crassa
MDYEALKEQWGEVEDRDGVRLSWNVFPSTRMEASRLVVPIGALYTPLKEKPDTPLLQFDPVSCKQPCRSVLNPYCQVDVRARLWICPFCLSRNPLPPHYKDITANAIPPELHPSNTTIEYRLSRPAPAPPIFLYVVDTCQEEDSLAALKESLIMSLSLLPEHALVGLITYGTMAQVHEIGYTECPKSYVFRGNKEYAAKQVQEMLGLVQPAMRPGMPMQQPGRPFPAGPASRFLLPVSQAEFQLTKAIEQLQKDPWPVAGNLRALRCTGVALSVAVGLLETSFQNAGGRIMLFAGGPATEGPGMVVGPELREPIRSHHDIDRDNIKYYKKALKFYDNLAKRTAHNGHTIDIFAGCLDQVGLLEMKGLCNSTGGHMILTDSFTSSMFKQSFVRIFEKDADDNLLMGFNAVLEVLTTKELKVTGLIGHAVSLNKKSTSVGETECGIGNTCTWKMCGIDPSSSYGIYFEIANQGGPSQNMQSPQKGMMQFLTYYQHSSGHFHLRVTTIARNLSGPAGDPAIAQSFDQEAAAVLMSRIAVFKAEVDDGPDVLRWVDRMLIRLCARFADYRKDDPSSFRLEKNFTLYPQFMFHLRRSQFLQVFNNSPDETAFYRHVLNHEDVSNSLIMIQPTLDSYTFDQEGGVPVLLDSTSIQPTHILLLDTFFHILIFHGETIAEWRKAGYQDQEGYENFAALLEQPKEDARDLITDRFPLPRFIVCDQGGSQARFLLSKLNPSTTHTSGAGAYGGVGAQSAQTIFTDDVSLQTFMEHLMKLAVSGTN

SEQ ID NO: 1103 - protein, 634 aa, Pasteurella multocida
MGKIIGIDLGTTNSCVAVMDGDKPRVIENAEGDRTTPSIIAYTQDNETLVGQPAKRQAVTNPKNTLFAIKRLIGRRFQDEEVQRDVSIMPFEIVAADNGDAWVGVKGEKMAPPQISAEVLKKMKKTAEDFLGEPVTEAVITVPAYFNDAQRQATKDAGRIAGLEVKRIINEPTAAALAYGLDKGQGNKTIAVYDLGGGTFDLSIIEIDEVGGEKTFEVLSTNGDTHLGGEDFDNRVINYLVDEFKKEQGVDLRNDPLAMQRLKEAGEKAKIELSSAQQTDVNLPYITADATGPKHLNIKLTRAKLESLVEDLVSRSLEPVKIALADAGLSVSQIDDVILVGGQTRMPLVQQKVEAFFGKAPRKDVNPDEAVAIGAAVQGGVLAGDVKDVLLLDVTPLSLGIETMGGVMTTLIEKNTTIPTKKSQVFSTAEDNQSAVTIHVLQGERKRAADNKSLGQFNLEGINPAPRGMPQIEVTFDIDADGIIHVSAKDKGTNKEQKITIKASSGLTDEEIQQMVRDAEANAEADRKFEELVQARNQADHLVHGTRKQLSEVGDKLSAEDKAPIEKAVADLEAAAKGEDKAEIETKVQALIQVSEKLMQAAQPQPEAQAQQAQSGKSNDDVVDAEFEEVKDNK

SEQ ID NO: 1104 - protein, 122 aa, Pasteurella multocida
MSLTNEQIIEAIASKSVTEIVELIAAMEEKFGVSAAAAAVAVAAGPAEAAEEKTEFDVVLAGAGANKVAVIKAVRGATGLGLKEAKDLVESAPAVLKEGISKAEAEALKKELEEAGAQVEVK

SEQ ID NO: 1105 - protein, 411 aa, Pasteurella multocida
MEKDTELHCSFCGKEQKHVSKLIAGTSGYICNECIELCHDMLLSDAVETPEVESTEQQKLPTPHEIRAHLDDYVIGQDYAKKVLSVAVYNHYKRLRSDKQITDVELGKSNILLIGPTGSGKTLLAETMARMLNVPFAMADATTLTEAGYVGEDVENVLQKLVQSCDYDVERAEQGIIYIDEIDKITRKSENPSITRDVSGEGVQQALLKLIEGTVASIPPQGGRKHPQQEMLRVDTSKILFICGGAFAGLDKVIEKRVHVGSGIGFSAEVKSKQDKATLSQLFEQVEPDDLMKFGLIPEFIGRLPVVAPLAELDEEALVKILTEPKNALIKQYQALFSLEDVALEFSPEALTAMAKKALARKTGARGLRSIVEAILLDTMYDLPSLQHLEKVIVEASTITDNQPPTLVYKA

SEQ ID NO: 1106 - protein, 451 aa, Ipomoea trifida
MSSNTGGHRHCYRRLCSYYFLIFQILILPTLHAPLALNSITPTHPLAVDQTLVSSNALFELGFFTPENSGRWYVGIWYKDIEEKTVVWVANRNSPLTNSTGRGVLRIGDDGNIYLVDGDGNSIWGSSSTTRPGTTVAELLDSGNFVLRRENDRTEENYLWQSFDYPTDTLLPGMKLGCDSKTGLNRYISSWKTATDPAEGDFSFKLDTHGLPEAFLRKKNDVIYGSGAWNGIRFSGVPEMNPTAVITFSFVTTKSENYYTFSLHNETIFSKLQVSHGGYLERYMWIPTNKIWNKFWYAPADQCDYYKECGPYGICDTSISPVCECLVGFGPRNRQAWDLRDGRDGCVRVHDLECESDGFLAMNYMKLPESSSAFVDAGMSFDECTAMCKRNCSCAAYANSNITGDGSGCVMWTTELLDMRQYTAAEGGQVLYVRVAASDVGTFVLRSHLAF

SEQ ID NO: 1107 - protein, 411 aa, Lactococcus lactis
MSNTQNPNIHCSFCGKSQDDVKKLIAGSDVYICNECIELSTRILEEELREEQDSEMLEVKTPKEMFDHLNEYVIGQEKAKRALAVAVYNHYKRINFAASKIAEDIELQKSNILLIGPTGSGKTFLAQTLAKSLNVPFAIADATSLTEAGYVGEDVENILLKLLQASDFNIERAERGIIYIDEIDKIAKKSENVSITRDVSGEGVQQALLKIIEGTVASVPPQGGRKHPNQEMIQIDTKNILFIVGGAFDGIEEIVKQRLGEKIIGFGANNKKLNDDDSYMQEIIAEDIQKFGLIPEFIGRLPIVAALERLTEEDLIQILTEPKNALIKQYKQLLLFDNVELEFEDEALMAIARKAIERKTGARGLRSIIEEVMMDIMFEVPSHEEITKVIINEAVVDGKAEPQMIREAKKK

SEQ ID NO: 1108 - protein, 129 aa, Porphyra purpurea
MSTKVENILEELKSLNLLEAAELVKQIEETFDVDASAASGGVMMAAPSSAPAASDVEEKTEFDVVLEEVPAPKKIAVLKVVRSLTGLGLKEAKDLVESAPKTLKEGASKDDAEAMKKQLEDAGATVGVK

SEQ ID NO: 1109 - protein, 1135 aa, Oryza sativa; identical to SEQ ID NO: 689

SEQ ID NO: 1110 - protein, 420 aa, Bacillus subtilis
MFKFNEEKGQLKCSFCGKTQDQVRKLVAGPGVYICDECIELCTEIVEEELGTEEEVEFKDVPKPQEIREILNEYVIGQDQAKKSLAVAVYNHYKRINSNSKVDDVELSQSNISLIGPTGSGKTLLAQTLARILNVPFAIADATSLTEAGYVGEDVENILLELIQAADYDVEKTGKGIIYIDEIDKVARKSENPSITRDVSGEGVQQALLKILEGTVASVPPQGGRKHPHQEFIQIDTTNILFICGGAFDGIEQIIKRRLGQKVIGFGADNKAADLEKEDLLSKVLPEDLLRFGLIPEFIGRLPVIASLEKLDEEALVAILTKPKNALVKQFKKMLELDNVELEFEEEALSEIAKKAIERKTGARGLRSIIEGIMLDVMFELPSRDDIEKCVITGATVTHGEPPRLLLKDGTEVSQDKTSA

SEQ ID NO: 1111 - protein, 628 aa, Tulipa gesneriana
MGGRDLESSTPLLHHEPYSPRKTITTILSCITAVALLLSLVTLLNTKHEADHRPPDVAFPMSRGVFEGVSEKSTASLIGSAARFPWTDAMLQWQRTGFHFQTEKNWMSDPDGPMFYKGWYHIFYQHNPDSAVWGNITWGHAVSRDLIHWFHLPIAFFPDQWYDARGPLTGSATFLPDGRIAMLYTGITTEFVQVQCQVYPEDVDDPLLLKWFKSDANPILVPPPGIGSKDFRDPTTAWYDVAEASWKLAIGSKDEQHNGISLIYRTYDFVSYELLPILLHAVEGTGMWECVDFYPVLTNSTVGLDTSVPPGPGVRHVLKASLDDDKHDYYAIGTYDVVSGTWTPDDVESDVGIGWRYDYGKFYASKTFFDSAKGRRVLWGFTGETDSEQNNRLKGWASVLPIPRTILFDQKTGSNLLLWPVEEVERLRTSRQDFENIDIGIGAVVPLDIGKAIQLDIVAEFEIDGATLEASVEADLGYNCSTSDGAFGRGVLGPFGFLVLSDEDLSEQTAIYFYVGRKMDGALHTFFCQDELRSSKANDLVKRVFGSIVPVLHGETFTMRILLDHSIVESFAQGGRTCITSRIYPTKAFDGAARVFIFNNATGAKVTAKSIKIWQMNSASIIPYPFKA

SEQ ID NO: 1112 - protein, 625 aa, Tulipa gesneriana
RDLESSTPLLHREPYSPRKTITTILSCITAAAILLSLITLLNTKHEADHHPPDVAFPMSRGVFEGVSEKSTASLIGSAARFPWTDAMLQWQRTGFHFQPEKNWMNDPDGPMFYKGWYHIFYQYNPVSAVWGNITWGHAVSRNLIHWFHLPIAFFPDQWYDARGALTGSATFLPDGSIAMLYTGITTEFVQVQCQVYPEDVDDPLLLKWYKSDANPILVPPPGIGSKDFRDPTTAWYDVAEASWKLAIGSKDEQHNGISLIYRTYDFVSYELLPILLHAVPGTGMWECVDFYPVLTNSTVGLDTSVPPGPGVRHVLKASLDDDKHDYYAIGTYDVVSGTWTPDDVEADVGIGWRYDYGKFYASKTFFDWPKGRRVLFGFTGETDSEQNNRLKGWASVLPIPRTILFDQKTGSNLLLWPVEEVERLRFNRQDFENIDIGIGAVVPLDIGRAIQLDIVAEFEIDGATLEASVEADLGYNCSTSGGTFGRGVLGPFGFLVLSDEDLSEQTAIYFYVGRKVDGALQTFFCQDELRSSKANDLVKRVFGSIVPVLHGEILTMRILLDHSIVESFAQGGRTCITSRIYPTKAFDGAARVFVFNNATGAKVTAKSIKIWQMKSASITPYPFKA

SEQ ID NO: 1113 - protein, 426 aa, Mycobacterium leprae
MARIGDSGDLLKCSFCGKSQTQVKKLIAGPGVYICDECIDLCNEIIEEELADADDVQLDELPKPVEIREFLEGYVIGQDTAKRTLAVAVYNHYKRIQAGEKGRDSKREPVELAKSNILMLGPTGCGKTYLAQTLAKMLNVPFAIADATALTEAGYVGEDVENILLKLIQAADYDVKRAETGIIYIDEVDKIARKSENPSITRDVSGEGVQQALLKILEGTQASVPPQGGRKHPHQEFIQIDTTNVLFIVAGAFAGLDKIIYERIGKRGLGFGAEVRSKAEIDTTDHFADVMPEDLIKFGLIPEFIGRLPVIASVINLDMESLVKILSEPKNALVKQYTWLFEMDGVELEFTNDALEAVADQAIHRGTGARGLRAIMEEVLLPVMYDIPSRDDVAKVVVTKETVQDNVLPTIVPRKPSRTERRDKSA

SEQ ID NO: 1114 - protein, 470 aa, Escherichia coli
MKKTKIVCTIGPKTESEEMLAKMLDAGMNVMRLNFSHGDYAEHGQRIQNLRNVMSKTGKTAAILLDTKGPEIRTMKLEGGNDVSLKAGQTFTFTTDKSVIGNSEMVAVTYEGFTTDLSVGNTVLVDDGLIGMEVTAIEGNKVICKVLNNGDLGENKGVNLPGVSIALPALAEKDKQDLIFGCEQGVDFVAASFIRKRSDVIEIREHLKAHGGENIHIISKIENQEGLNNFDEILEASDGIMVARGDLGVEIPVEEVIFAQKMMIEKCIRARKVVITATMMLDSMIKNPRPTRAEAGDVANAILDGTDAVMLSGESAKGKYPLEAVSIMATICERTDRVMNSRLEFNNDNRKLRITEAVCRGAVETAEKLDAPLIVVATQGGKSARAVRKYFPDATILALTTNEKTAHQLVLSKGVVPQLVKEITSTDDFYRLGKELALQSGLAHKGDVVVMVSGALVPSGTTNTASVHVL

SEQ ID NO: 1115 - protein, 247 aa, Oryza sativa
MGRGKIEIKRIENTTNRQVTFCKRRNGLLKKAYELSVLCDAEVALIVFSSRGRLYEYANNSVKSTVERYKKANSDTSNSGTVAEVNAQHYQQESSKLRQQISSLQNANSRTIVGDSINTMSLRDLKQVENRLEKGIAKIRARKNELLYAEVEYMQKREVELQNDNMYLRSKVVENERGQQPLNMMGAASTSEYDHMVNNPYDSRNFLQVNIMQQPQHYAHQLQPTTLQLGSRPSISFGVDTVRTHVR

SEQ ID NO: 1116 - protein, 660 aa, Arabidopsis thaliana
DALLPISAREEEPLCPYTRLPMADPNQETHGPRRRRPFKGLLAVSFGLLFIAFYVALIATHDGSRSNDEGIDETETITSRARLAGVSEKRNDGLWKLSGDRNTPAFEWNNSMLSWQRTAFHFQPEQNWMNDPNGPLFYKGWYHFFYQYNPNAAVWGDIVWGHAVSRDLIHWVHLPIAMVADQWYDSNGVWTGSATFLPDGSIVMLYTGSTDKAVQVQNLAYPEDPNDPLLLKWVKFPGNPVLVPPPGILPKDFRDPTTAWKTSEGKWRITIGSKLNKTGISLVYDTIDFKTYEKLDTLLHRVPNTGMWECVDFYPVSKTAGNGLDTSVNGPDVKHIVKASMDDTRFDHYAVGTYFDSNGTWIPDDPTIDVGMTASLRYDYGKFYASKSFYDQNKGRRVLWSWIGESDSEASDVQKGWSSLQGIPRTVVLDTKTGKNLVQWPVEEIKSLRLSSKQFDLEVGPGSVVPVDVGSAAQLDIEAEFEINKESLDKIIGNASVVAEAEEFSCEKSGGSTVRGALGPFGFSVLATESLSEQTPVYFYVAKGKDSELKTFFCTDTSRSSVANDVVKPIYGSVVPVLKGEKLTMRILVDHSIVEAFGQGGRTCITSRVYPTTAIYGAAKLFLFNNALDATVTASFTVWQMNSAFIHPYSDEAVRALSRT

SEQ ID NO: 1117 - protein, 194 aa, Saccharomyces cerevisiae [sequence omitted]

SEQ ID NO: 1118 - protein, 624 aa, Mesembryanthemum crystallinum
MPAVYGDRLTTFEDSEKESEYGYIRKVSGPVVVADGMNGAAMYELVRVGYDNLIGEIIRLEGDSATIQVYEETAGLMVNDPVLRTHKPLSVELGPGILGNIFDGIQRPLKTIAKRSGDVYIPRGVAVPPLDKDALWEFEPKKIGEGDLLTGGDLYAKVYENSLMAHRVALPPDAMGKITYIAPPGQYSIQDTVLELEFQGVKKEFTMLQSWPVRTPSPVASKLAADTPLLTGQRVLDALFPSVLGGTCAIPGAFGCGKTVISQALSKYSNSDAVVYVGCGERGNEMAEVLMDFPQLTMTLPDGREESVMKRTTLVANTSNMPVAAREASIYTGITIAEYFRDMGYNVSMMADSTSRWAEALREISGRLAEMPADSGYPAYLAARLASFYERAGKVKCLGGPERTGSVTIVGAVSPPGGDFSDPVTSATLSIVQVFWGLDKKLAQRKHFPSVNWLISYSKYTSALETFYEKFDPDFINIRTKAREVLQREDDLNEIVQLVGKDALAETDKITLETAKLLREDYLAQNAFTPYDKFCPFVYKSVWMMRNIIHFYNLANKAVERGAGSDGQKITYSLIKLRLGDLFYRLVSQKFEDPAEGEDTLVAKFQKLYEDLSAAFRNLDDETR

SEQ ID NO: 1119 - protein, 553 aa, Hordeum vulgare
MYRVKSESDCEMMHQEDQMDSPVGDDGSSGGGSPHRGGGPPLKKGPWTSAEDAILVDYVKKHGEGNWNAVQKNTGLFRCGKSCRLRWANHLRPNLKKGAFTPEEERLIIQLHSKMGNKWARMAAHLPGRTDNEIKNYWNTRIKRCQRAGLPIYPASVCNQSSNEDQQGSSDFNCGENLSSDLLNGNGLYLPDFTCDNFIANSEALSYAPQLSAVSISSLLGQSFASKNCGFMDQVNQAGMLKQSDPLLPGLSDTINGALSSVDQFSNDSEKLKQALGFDYLHEANSSSKIIAPFGGALTGSHAFLNGTFSTSRTINGPLKMELPSLQDTESDPNSWLKYTVAPAMQPTELVDPYMQSPTATPSVKSECASPRNSGLLEELLHEAQGLRSGKNKQLSVRSSSSSVSTPCDTTVVSPEFDLCQEYWEERLNEYAPFSGNSLTGSTAPMSAASPDVFQLSKISPAQSPSLGSGEQAMEPAYEPGAGDTSSHPENLRPDAFFSGNTADSSVFNNAIAMLLGNDMNTECKPVFGDGIMFDTSVWSNLPHACQMSEEFK

SEQ ID NO: 1120 - protein, 128 aa, Synechocystis sp.
MSAATDQILEQLKSLSLLEASELVKQIEEAFGVSAAAPVGGMVMAAAAAAPAEAAEEKTEFDVILEEVPADKKIAVLKVVRTITGLGLKEAKELVESTPKAIKEATGKDDAEAIKKQIEEAGGKAAVK

SEQ ID NO: 1121 - protein, 349 aa, Solanum tuberosum
MAGSNINQPLLDQLPKTLQNVDSRRRRLRRLKSAPMPEFVPGEMNDIKDDQSLPRYESILDKLHPSFRKVILYLAIYLTIGTTCFYFVQNQIQGKKVNGVLDSVYFCVVTMTTVGYGDLVPNSATAKLLASFFVFSGMALVGMVLSKGADYLVEKQETLLIKALHMRDKVGPSVILEEIETNKVRYKCFVITATLVVLIVVGTVFLAEVEKLSTIDAFYCVCSTITTLGYGDKSFSTKAGRIFAIFWILTSTLCLAQFFLYVAEFNTERKQKELVQWVLSRKMTNVDLEVADLDNDRIVGAAEFVVYKLKEMGKISQDDVSLLLDEFECLDVDQSGTLSTTDLSLAQSS

SEQ ID NO: 1122 - protein, 470 aa, Escherichia coli
MKKTKIVCTIGPKTESEEMLAKMLDAGMNVMRLNFSHGDYAEHGQRIQNLRNVMSKTGKTAAILLDTKGPEIRTMKLEGGNDVSLKAGQTFTFTTDKSVIGNSEMVAVTYEGFTTDLSVGNTVLVDDGLIGMEVTAIEGNKVICKVLNNGDLGENKGVNLPGVSIALPALAEKDKQDLIFGCEQGVDFVAASFIRKRSDVIEIREHLKAHGGENIHIISKIENQEGLNNFDEILEASDGIMVARGDLGVEIPVEEVIFAQKMMIEKCIRARKVVITATQMLDSMIKNPRPTRAEAGDVANAILDGTDAVMLSGESAKGKYPLEAVSIMATICERTDRVMNSRLEFNNDNRKLRITEAVCRGAVETAEKLDAPLIVVATQGGKSARAVRKYFPDATILALTTNEKTAHQLVLSKGVVPQLVKEITSTDDFYRLGKELALQSGLAHKGDVVVMVSGALVPSGTTNTASVHVL

SEQ ID NO: 1123 - protein, 474 aa, Escherichia coli
MSRLVVVSNRIAPPDEHAASAGGLAVGILGALKAAGGLWFGWSGETGNEDQPLKKVKKGNITWASFNLSEQDLDEYYNQFSNAVLWPAFHYRLDLVQFQRPAWDGYLRVNALLADKLLPLLQDDDIIWIHDYHLLPFAHELRKRGVNNRIGFFLHIPFPTPEIFNALPTYDTLLEQLCDYDLLGFQTENDRLAFLDCLSNLTRVTTRSAKSHTAWGKAFRTEVYPIGIEPKEIAKQAAGPLPPKLAQLKAELKNVQNIFSVERLDYSKGLPERFLAYEALLEKYPQHHGKIRYTQIAPTSRGDVQAYQDIRHQLENEAGRINGKYGQLGWTPLYYLNQHFDRKLLMKIFRYSDVGLVTPLRDGMNLVAKEYVAAQDPANPGVLVLSQFAGAANELTSALIVNPYDRDEVAVALDRALTMSLAERISRHAEMLDVIVKNDINHWQECFISDLKQIVPRSAESQQRDKVATFPKLV

SEQ ID NO: 1124 - protein, 535 aa, Hordeum vulgare
MEVNVKGNYVQVYVMLPLDAVSVNNRFEKGDELRAQLRKLVEAGVDGVMVDVWWGLVEGKGPKAYDWSAYKQLFELVQKAGLKLQAIMSFHQCGGNVGDAVNIPIPQWVRDVGTCDPDIFYTDGHGTRNIEYLTLGVDNQPLFHGRSAVQMYADYMTSFRENMKEFLDAGVIVDIEVGLGPAGEMRYPSYPQSHGWSFPGIGEFICYDKYLQADFKAAAAAVGHPEWEFPNDVGQYNDTPERTQFFRDNGTYLSEKGRFFLAWYSNNLIKHGDRILDEANKVFLGYKVQLAIKISGIHWWYKVPSHAAELTAGYYNLHDRDGYRTIARMLKRHRASINFTCAEMRDSEQSSQAMSAPEELVQQVLSAGWREGLNVACENALPRYDPTAYNTILRNARPHGINQSGPPEHKLFGFTYLRLSNQLVEGQNYANFKTFVDRMHANLPRDPYVDPMAPLPRSGPEISIEMILQAAQPKLQPFPFQEHTDLPVGPTGGMGGQAEGPTCGMGGQVKGPTGGMGGQAEDPTSGMGGELPATM

SEQ ID NO: 1125 - protein, 120 aa, Sonchus oleraceus
ENANVVGHDTKSNCHLMEKIEKENLLHRAFSVFLFNSKYELLLQQRSATKVTFPLVWTNTCCSHPLYRESELIAEKTLGVRNAAQRKLLDELGIPAEDVPVDEFTPLGRMLYKAPSDGKW

SEQ ID NO: 1126 - protein, 119 aa, Metaplexis japonica
VDQCVGHDTKYNCHLMEKIESENLLHRAFSVFLFNSKYDLLLQQRSATKVTFPLVWTNTCCSHPLYRDSELIEEGALGVRNAAQRKLLDEAGYAPEDVPVDGFTPLGRMLYKAPSDGKW

SEQ ID NO: 1127 - protein, 120 aa, Youngia japonica
ENDNVVGHDTKYNCHLMEKIEKENLLHRAFSVFLFNSKYELLLQQRSGTKVTFPLVWTNTCCSHPLYRESELVAENTLGVRNAAQRKLLDELGIPAEHVPVDEFTPLGRMLYKAPSDGKW

SEQ ID NO: 1128 - protein, 507 aa, Caulobacter crescentus
MTQVFPTPAAHAREILAKLGAPPLPADAGEPVRGPIDGAILGHVVYDDARQIEAKVAAACRAFADWRVVPAPRRGELVRLFGEELRAAKADLAALVTLEAGKIASEAAGEVQEMIDICDFAVGLSRQLHGLTIASERPGHAMRETWHPLGPVAVISAFNFPVAVWAWNACLALVCGDPVIWKPSEKTPLTALATQAILERALARFRDAPQGLSSVVLGARDAGERLARDPRIPLVSATGSTRMGRAVAPMVAERFGRSILELGGNNAMIVTPSADLSLALRAIVFSAAGTAGQRCTSLRRLIVHESLVDKVSDAVEAAFQRLSVGDPRDPKTLLGPLIDKAAYDAFIAAMNQVRAEGGSVAGGERVLIDEHPDAYYVRPALARLPAPAPCMQRETFAPLLHVVPYNSFDMAIAIQNDVPQGLSSCVMTNDVREAERFLAAAGSDCGIANVNIGPSGAEIGGAFGGEKETGGGRESGSDSWKQYMRRQTATVNYSGALPLAQGVRFDL

SEQ ID NO: 1129 - protein, 483 aa, Caulobacter crescentus
MQVRNDSGDSKANLDAVIVWFRKDLRIADNPALRHAAQSGRPVIPLYILDETPGIRPMGGASLWWLDKSLKSLAASLETLGTKLVLRKGVAAEVLDQLIAQSGARSVVWNRLYDKPSTDRDAAIKAALRDRGVDCQSFNAGLLNEPWTVKNGSDQPYKVFTPYWRAAREHLTDVAVTAAPGHLVAPARFPASESLASWNLHPTKPDWSKGFDLWTPGEAGAHARLDAFLKGPIKGYGDQRDIPGVEATSKLSPHLHFGEIGPRQVWLATRSAADQGDIPLAEADKFLSEIGWREFNHSILYNWPHMPSANFKPEFDGFPWVKDEGALEAWKRGQTGYPIVDAGMRELWTTGFMHNRVRMIVASFLIKHLMIDWREGEAWFWDTLLDADLANNVGNWQWTAGSGADAAPYFRIFNPIAQGEKFDPKGDYVRRWVPELRNVSDDVIHKPWTKPLHLPAGAKRLYSRPIVDHAMARARALEAYHGL

SEQ ID NO: 1130 - protein, 461 aa, Arabidopsis thaliana
MDRYKLIKEVGDGTFGSVWRAINKQTGEVVAIKKMKKKYYSWDECINLREVKSLRRMNHPNIVKLKEVIRENDILYFVFEYMECNLYQLMKDRQKLFAEADIKNWCFQVFQGLSYMHQRGYFHRDLKPENLLVSKDIIKIADFGLAREVNSSPPFTEYVSTRWYRAPEVLLQSYVYTSKVDMWAMGAIMAELLSLRPIFPGASEADEIYKICSVIGTPTEETWLEGLNLANTINYQFPQLPGVPLSSLMPSASEDAINLIERLCSWDPSSRPTAAEVLQHPFFQSCFYVPPSLRPKPSVARTPPPVGPRGSFEHQSVKRYPVSLANAKPFNSYVSPKSNAAFGSGVQRKLDMVNQDGTRNTKPVRSSVRDSKYRPPGKKSPPAASLNKNRVTRSSVSETADKLANMTIGATGSRRHSVSVVGQHQQLKPPPMKAGWVGETRDMFLRPTQPTTNAYSRKVAG

SEQ ID NO: 1131 - protein, 607 aa, Geobacillus thermoglucosidasius
MSKIIGIDLGTTNSCVAVLEGGEPKVIPNPEGSRTTPSVVAFKNGERLVAKRQAITNPNTIISIKRHMGTDYKVEIEGKKYTPQEISAIILQYLKSYAEDYLGEPVTRAVITVPAYFNDAQRQATKDAGRIAGLQVERIINEPTAAALAYGLDKEEDQTILVYDLGGGTFDVSILELGDGVFEVKATAGDNHLGGDDFDQVIIDYLVEQFKQEHGIDLSKDKMALQRLKDAAEKAKKELSGVTQTQISLPFISANETGPLHIETTLTRAKFEELSAHLVERTMGPVRQALQDAGLTPADIDKVILVGGSTRIPAVQEAIKRELGKEPHKGVNPDEVVAIGAAIQGGVIAGEVKDVVLLDVTPLSLGIETMGGVFTKLIERNTTIPTSKSQIFTTAADNQTTVDIHVLQGERPMAADNKTLGRFQLTDIPPAPRGVPQIEVTFDIDANGIVHVRAKDLGTNKEQSITIKSSSGLSEEEIQRMIKEAEENAEADRKRKEAAELRNEADHLVFTTEKTLKEVEGKVDEAEVKKAREAKDALKAALEKNDIDDIRKKKEALQEIVQQLSVKLYEQAAKQAQAQQQTGAGDAAKKDDNVVDAEFEEVKDDNK

SEQ ID NO: 1132 - protein, 502 aa, Lactococcus lactis
MNKRVKIVSTLGPAVEIRGGKKFGESGYWGESLDVEASAKNIAALIEEGANVFRFNFSHGDHPEQGARMATVHRAEEIAGHKVGFLLDTKGPEMRTELFADGADAISVVTGDKFRVATKQGLKSTPELIALNVAGGLDIFDDVEIGQTILIDDGKLGLSLTGKDAATREFEVEAQNDGVIGKQKGVNIPNTKIPFPALAERDDADIRFGLSQPGGINFIAISFVRTANDVKEVRRICEETGNPHVQLLAKIENQQGIENLDEIIEAADGIMIARGDMGIEVPFEMVPVYQKLIISKVNKAGKIVVTATNMLESMTYNPRATRSEISDVFNAVIDGTDATMLSGESANGKYPRESVRTMATVNKNAQTMLKEYGRLHPERYDKSTVTEVVAASVKNAAEAMDIKLIVALTESGNTARLISKHRPNADILAITFDEKVERGLMINWGVIPTMTEKPSSTDDMFEVAEKVALASGLVESGDNIIIVAGVPVGTGRTNTMRIRTVK

SEQ ID NO: 1133 - protein, 177 aa, Secale cereale
PLTPEAKPQELPMASTTFSSAFSILSLPSSSPSPPPSPPRTLPVANRRRRAAAVASTATESPKVLELGDAIAGLTLEEARNLVDHLQERLCVSAASFPPAAAGLRAAAVEEAPVEQTEFDVVIEEVPSSARIATIKIVRALTNLALKEAKDLIEGLPKKLKEAVSKDEAEEAKKQLE

SEQ ID NO: 1134 - protein, 623 aa, Agropyron cristatum
MGSHTMPGKPPLPYAYKPLLSGTTDEANGQRTGCTRRRVCAAMLTASAMVVVVVAAAFLARARVDKVVNEEAAGGFPWSNEMLQWQRSSYHFQPAKNYMSDPDGLLYYGGWYHMFYQYNPVGTDWADGMAWGHAVSRNLVQWRTLPIAMKPDQWYDILGVLSGSVTVLPNGTVIMLYTGATNDWYVEATCLALPADPNDPLLRRWTKHPANPIIWSPPGIGTKDFRDPMTPWYDDSDHTWRTLFGSKDDHHGHHDGIAIMYKTKDFLNYELIPGILHRVENTGEWECIDFYPVGGGGSENSSEVLHVLKASMDDERHDYYSLGTYDSAANIWTPIDPELDLGIGLRYDWGKFYASTSFYDPAKKRRVLMGYVGEVDSKRADVVKGWASIQSVPRTIALDEKTRTNLLLWPVEEIETLRLNATELSDVTLNTGSLVHVPLRQGTQPDIEATFHLDAAAVAALNEADVGYNCSSSGGAVNRGALGPFGLLVLAAGDRRGEKTAVYFYVSRGLDGGLQTSFCQDELRSSRAKDVTKRVIGSTVPVLGGEAFSMRVLVDHSIVQGFAMGGRITMTSRVYPMEAYQEAGVYLFNNATGASVTAERLVVHEMDSAHNQLSNEDAYMYVR

SEQ ID NO: 1135 - protein, 504 aa, Mesorhizobium loti
MTIAKETAELLAKLGVAKDALVGGDLIVRSPVTGEQIAALKTISPADAAKTIDAAHKAFQSWRLVPGPKRGELVRLLGEELRAHKAELGRLVSIEVGKIPSEGLGEVQEMIDICDFAVGLSRQLYGLTIATERPGHRMMETWHPLGVVGVISAFNFPVAVWSWNAALALVCGDAVVWKPSEKTPLTALACEAIFKRAVKRFGADAPQGLAPVLIGDRAVGEILVDHPKVPLVSATGSTRMGRDVGPRLAKRFARAVLELGGNNAGIVCPTADLDMALRAIAFGAMGTAGQRCTTLRRLFVHESVYDALVPRLKKAYQSVSVGNPLETSSLVGPLIDKAAFDAMQKALTEAAAHGGKVAGGARVENGHPDAYYVHPALVEMPKQVSPVTEETFAPILYVMKYSDFDAVLDEHNAVGAGLSSSIFTRDLQESERFLGVDGSDCGIANVNIGTSGAEIGGAFGGEKETGGGRESGSDAWKAYMRRATNTVNYSKALPLAQGVSFDID

SEQ ID NO: 1136 - protein, 420 aa, Mesorhizobium loti
MRRVVVTGLGLLSPFGMGFEHSWKELLTGRSAAKRITEFEVEDLACKIAHVVPRGDGSNATFNPESVLEPKELRKIGDFILYGIAAADEALKDSGWEPKTHEEQCATGVLIGSGIGGIEGIAENAMILKERGPRRISPFFIPGQIINLVSGQVSIRHGLKGPNHAVVTACSTGAHAIGDAARLIMWGDADVMVAGGAEAPVTRLSIAGFAACRALSTERNDTPQTASRPYDRDRDGFVMGEGAGVVVLEELEHAKARGAKIYAEVTGYGLTGDAYHITAPAEDGDGAFRCMTAALNRAKLTPADVDYINAHGTSTMADTIELGAVERLVGNAASKISMSSTKSSIGHLLGAAGAAEAIFSILAIRDNVAPATINLDNPERETAIDLVPNKPRSRQIDVALSNSFGFGGTNASLVFQRYNG

SEQ ID NO: 1137 - protein, 424 aa, Mesorhizobium loti
MSKVGNNSGDSKNTLYCSFCGKSQHEVRKLIAGPTVFICDECVELCMDIIREENKTSMVKSREGVPTPQEILKVLDDYVIGQPYAKRVLSVAVHNHYKRLAHAGKNNDVELAKSNILLIGPTGCGKTLLAQTLARIIDVPFTMADATTLTEAGYVGEDVENIILKLLQSADYNVERAQRGIVYIDEIDKISRKSDNPSITRDVSGEGVQQALLKIMEGTVASVPPQGGRKHPQQEFLQVDTANILFICGGAFAGLDKIISDRGRKTSIGFGATVASPEDRRTGDIFRQVEPEDLLKFGLIPEFVGRLPVLATLEDLDEPALIQILTEPKNALVKQYQRLFEMENVDLTFHENALSAIAKRAIERKTGARGLRSIMEAILLDTMFELPALEGVREVVISEEVVTGSARPLYIYSEQKEKKGNVSA

SEQ ID NO: 1138 - protein, 725 aa, Oryza sativa
MASAILLSIAIMAQLSSISAQPAPGCQSHCGDMEIPYPFGIGTECAIEPGFVIYCNKTADGSMKPFLINVEVLNISLLHGQTRALNALSTYCYNDVTKSMESSRWSLDFSTWPYRFSNLHNKFVVIGCNTLSYIYNGEYTTACASVCAKAPTNDSCDGVGCCQNNIAKGLNSYNVTFFTVYNDSSNLQSNPCSYAALVETDTFRFKTEYVTTMKFNETYNGQQPVVLDWAIGKVGCKEANMTSYACRSKHSECVDSINGPGYLCNCTLGYHGNPYITDGCIDVNECEQNQSPCPKGATCRNTEGWYHCSCPVGRKLAKETNTCNPDISLIIGVSIGSIVLVIIIFFVRIIFERRKLTDVKKKYIQEHGGLLLFEKMKSDQGLAFKVFTQAELEQATNKFEKSQILGHGGHGTVYKGITKDNITVAIKKCALIDDRHKKEFGKEMLILSQINHKNIVKLLGCCLEVDVPMLVYEFIPNGTLFDLIHGKNRTLHIPFSSLLRIVNEAAEGLAFLHSYANPPILHGDVKTSNILLDENYMAKVSDFGASILAPNDEAQFVTMVQGTCGYLDPEYLQTCQLTEKSDVYSFGVVILEILTGQMPLKLEGSELQKSLSSSFLLAMKENNLEAMLDSQIKGHESMELLSGLAELAKQCLDMCSENRPSMKDVAEEISRLRKLSKHPWIQRDSETEGYLSGPSTSNFEIEQSTEYTRKDEQMPINPSTSYFIR

SEQ ID NO: 1139 - protein, 535 aa, Oryza sativa
MALNLAQSAAAAACFATAGDARRAASVVAMPSSSSSATTSLRMKRQAACEPVACRAVARHVAAAAASSRRNGVPVFVMMPLDTVSKCGSALNRRKAVAASLAALKSAGVEGIMVDVWWGIVESEGPGRYNFDGYVELMEMARKTGLKVQAVMSFHQCGGNVGDSVNIPLPRWVVEEMEKDNDLAYTDQWGRRNFEYISLGCDAMPVFKGRTPVECYTDFMRAFRDHFASFLGDTIVEIQVGMGPAGELRYPSYPESNGTWRFPGIGAFQCNDRYMRSSLKAAAEARGKPEWGHGGPTDAGGYNNWPEDTVFFRGDCGGWSTEYGEFFLSWYSQMLLEHGERVLSGATSVFGDGAGAKISVKVAGIHWHYGTRSHAPELTAGYYNTRHRDGYLPIARMLARHGAVLNFTCVEMRDHEQPQEAQCMPEALVRQVAAAARAAGVGLAGENALPRYDGTAHDQVVAAAADRAAEDRMVAFTYLRMGPDLFHPDNWRRFVAFVRRMSESGSPREAAESAAHGVAQATGSLVHEAAVALRS

SEQ ID NO: 1140 - protein, 127 aa, Odontella sinensis
MSEKIDQIVEELKTLTLLEASELVSKIEETFDVDASASVGGGMMMAGPAVVEEVEEKTEFDVMLDEVPADKKIAVLKVVRSLTGLGLKEAKELVESAPKQIQEGVAKDAAEEAKKQIEDAGGKASLK

SEQ ID NO: 1141 - protein, 587 aa, Cyanidium caldarium
MTTVRVNGMKNGIIKKVSGPVVSAENMDGAAMYELVRVGNEQLVGEIIRLEGSVATIQVYEETSGLTIGDPVLCTGSPLSVELGPGLMGNIFDGIQRPLEKIAERSNSVFIPRGVNVPALDRKKVWEFRPADNLKVGDPITAGDIYGIVPETPLIDHKIMLPPNQMGKIVFLAPPGDYTLEDTVLEIDFNGQKKKFSMVHQWPVRLPRPVTEKLRADKPLLTGQRVLDALFPSVQGGTCAIPGAFGCGKTVISQALSKFSNSDGIVYVGCGERGNEMAEVLKDFPELTMTVGDREESIMKRTLLVANTSNMPVAAREASIYTGITVSEYYRDMGLNISMMADSTSRWAEALREISGRLAEMPADSGYPAYLAARLASFYERAGKVSCLGSPNRQGSITIVGAVSPPGGDFSDPVTSATLGIVQVFWGLDKKLAQRKHFPSVNWLISYSKYMKALEPYYEERFPEFLNYQQKAREILQTEDDLMEIVQLVGKDSLAENDKITLEVAKMIREDFLAQNSFTEYDRFCPFYKSVLMLRNMIHFYELANKAVEGSGEQHLTLAQIKEQMGETIYKISGMKFLDPAQGWSLF

SEQ ID NO: 1142 - protein, 397 aa, Pyrus pyrifolia
MATTKFLLSLLLLVQLAATAYSIGVNYGTLGDNLPPPAKVADFIKTQTNIDAVKIFDTNPDIIKAFANTNISLTITIPNGDIPKLIKLRTAPRWVVDHVKPFYPASKIKYIAMGNEVLHWGDDALKSNLVPAMKTLHNALVREGIKDVKVSTPHSLGIMLSSDPPSMGRFRPEVIPILTQMLRFCRQTKSPFMVNPYPYFGWSPEKESYALFRPNNGAHDKFTGKFYTNMFDGLMDAVYSAAKAIGFGDVNLIAAETGWPSACEFPVCSVQNAVDYNGHLIKHIESGRGTPLMPNRKFETYIFALFNENQKPGPAAEKNFGLFKPDMTPVYNAGVMRNQQGGATPGPTMQIPTRPSTPAGPTTPAAPKRGKKGKPAGPAKSTTPATPATPASGGKKP

SEQ ID NO: 1143 - protein, 514 aa, Castanea crenata
MQASSLTYNEKMLANYVPVYVMLPLGVVTINNVLEDKAGIEKQLKELRAAGVDGVMVDVWWGIIESQGPKQYDWSAYRSLFQIVQDCGLKLQAIMSFHQCGGNVGDVVNIPLPQWVLDIGKSDPDVFYTNRLCNRNKEYLSLGVDNEPLFYGRTAVEIYGDYMKSFRESMSDFFEDGLIIDVEVGLGPAGELRYPSYPQSQGWVFPGIGEFQCYDKYLKAEFKEAATSVGHPEWELPDNAGTYNDTPTSTEFFGQSGTYLTEKGKFFLTWYSNKLLSHGDQILDEANKAFLGCKVKLAAKVSGIHWWYKADNHAAELTAGYYNLKDRDGYRPVARILSRHYAILNFTCLEMRDSEQSSDAKSGPQELVQQVLSGGWRENLEVAGENALPRYDRDAYNQILLNARPNGVNKEGPPKLRMYGVTYLRLSDDLLQENNFNIFKTFVKKMHADQDYCPDPEKYSHHIGPLERSKPKMPIEYLLEATEPMEPFPWDKETDMSVGGALSNLIDKIFSIFK

SEQ ID NO: 1144 - protein, 681 aa, Arabidopsis thaliana
MSGSVSGCGSGGCSIVWFRRDLRVEDNPALAAAVRAGPVNALFVWAPEEEGHYHPGRVSRWWLKNSLAQLDSSLRSLGTCLITKRSTDSVASLLDVVKSTGASQIFFNHLYDPLSLVRDHRAKDVLTAQGIAVRSFNADLLYEPWEVTDELGRPFSMFAAFWERCLSMPYDPESPLLPPKKIISGDVSKCVADPLVFEDDSEKGSNALLARAWSPGWSNGDKALTTFINGPLLEYSKNRRKADSATTSFLSPHLHFGEVSVRKVFHLVRIKQVAWANEGNEAGEESVNLFLKSIGLREYSRYISFNHPYSHERPLLGHLKFFPWAVDENYFKAWRQGRTGYPLVDAGMRELWATGWLHDRIRVVVSSFFVKVLQLPWRWGMKYFWDTLLDADLESDALGWQYITGTLPDSREFDRIDNPQFEGYKFDPNGEYVRRWLPELSRLPTDWIHHPWNAPESVLQAAGIELGSNYPLPIVGLDEAKARLHEALSQMWQLEAASRAAIENGSEEGLGDSAEVEEAPIEFPRDITMEETEPTRLNPNRRYEDQMVPSITSSLIRPEEDEESSLNLRNSVGDSRAEVPRNMVNTNQAQQRRAEPASNQVTAMIPEFNIRIVAESTEDSTAESSSSGRRERSGGIVPEWSPGYSEQFPSEENGIGGGSTTSSYLQNHHEILNWRRLSQTG

SEQ ID NO: 1145 - protein, 585 aa, Bacillus licheniformis
MRKTKIVCTIGPASESVEKLTQLMEAGMNVARLNFSHGDFEEHGARIKNIREAAGKLGKDIGILLDTKGPEIRTHTMENGSIELAAGSQLIVSMDEVIGTPDKISVTYDGLIHDVSVGSTILLDDGLVGLEVTDINKDKREIVTKVMNSGTLKNKKGVNVPGVSVNLPGITEKDANDIVFGIEQGVDFIAASFVRRPSDVLEIRELLEEHNAADIQIIPKIENQEGVDNIDAILEVSDGLMVARGDLGVEIPAEEVPLVQKELIKKCNALGKPVITATQMLDSMQRNPRPTRAEASDVANAIFDGTDAIMLSGETAAGNYPVEAVQTMHNIASRSEEALNHKKILSARSKQVSMSITDAIGQSVAHTAINLDVNAIVTPTESGHTARMISKYRPQAPIVAVTVNDAVSRKLSLVFGVFATSGQNHSSTDEMLEKAVQKSLDTGIVRHGDLIVITAGAVGEAGTTNLMKVYVVGDVVAKGQGIGRKSAFGEVVIAQNAQEAAKKMKDGAVLVTKSTDRDMMASLEKAAALITEEGGLTSHAAVVGLSLGIPVIVGMENATSILKEGEDITVDSARGAVYKGRASVL

SEQ ID NO: 1146 - protein, 867 aa, Chlamydomonas reinhardtii
MPHEFKTAVVWFRRDLRVDDNPALVAALAAAPNVIPVFIWAPEEEGQFQPGRCSRWWSKHSLVDLQQALAALGSRLVIRRSTDSTAALLQLVTELGAEAVFFNHLYDPISLMRDHDCKRGLTAAGVAHRTFNGDMLYEPWDVLDPNKQPYSTFDDFWNSVRAMPVPPPFPVSAPASMPAVPAAVPSMTVAEVDWFFTPEQEASSDQLKFKWKPGVGGAISELEHFLAERLTEFEHDRAKVDRDSTSRLSPWIHIGSISVRYIFYRVRQCQAEWLAAGTDRAQSCDDFLQQMGYREYSRYLAFHFPFIHERSLLGHLRACPWRIDQHAFKAWRQGQTGYPIVDAAMRQLWSSGWCHNRGRVVAASFLVKDLLLPWQWGLKHYWDAQIDADLECDALGWQYVSGGMSDAHPFSYMMDLEKEARRFDPDGEYVRRWLPALSRLPTEYIHAPWKAPASVLAAADVELGCNYPLPIITRSDAKANVDYACGVLEKSAVAPTGSESSGRYPYRAPTYPNAGGGGGASGGVDGAGSSGGNPTAAMGASGGAGPSSGTGTGGQGGAFRGRGDGGGSAPVSQQGGMLPPGVAVCVTAGTGGTQPDSRTVSGAHAGVSNSAGGVACDMPPPSHSHPRGGSSGVAAAGVGGVSGGPSSGGAAAPGATRKATAPGGAVFYHPGEASGEGHALLERILQQQRRQRGAANRQDGSGTNQPPPPVSMPGMLDAAGAAGGGGGGGGGLAGLPGVLQGLHGGAGATAAPAVAWAGRVAAGGVDDMDAVALWQQQQQLLQGGAAAFAFEQAMELLLARRRAGDGVSGFCGGDAPGRGGGDADEADGLMLEEDSEEARSALQGGFFVAKRLRCSTNIHVYLVCMHA

SEQ ID NO: 1147 - protein, 513 aa, Capsella rubella
MSDFDGNFNESTSCWAPPFSPSPRAILAMIDQAEDDGLDLISEMFPHTNLPRDHSAQSSEQRSGLGQRLAARVGFSPPPLDTENISPSAASLRSSTTVPPPVSAIPPGFIPSTLLQSPNMVTDSSQMIPAPSSDTNYGPQGMVETSGEGNAPTLIFNNDHPYQPVNADLPLLDVFDDVPTEESVYLPTYETDHVEPIGDSLVPNSFEHEFVGDANVNFISNEGTESVKDSESDDELDFDFEFEDEDEAEAEAEDNDEDKAEDEDEDNDEDGNEDEDEDDEEDENDEEEADHDDEADFDDAEPSSPKRRKFEASSNMIGATRTNKAQRVILQMESDEDNPEDGFRWRKYGQKVVKGNPNPRSYFKCTNNDCNVKKHVERGADNFKILVTSYDGIHNHPPPPARCRINSGPRNRSGTTTTTQNQSYRTDRLGRFPAPSSVITPMEMMPLSSFTPPLDMSKVYMTGLNKLPNFSVFQNPGYMYRNDEPMMNVVPNGSGIYGGIRHRLFAEFGVNLM

SEQ ID NO: 1148 - protein, 623 aa, Brassica napus
MPAFYGGKLTTFEDDEKESEYGYVRKVSGPVVVADGMAGAAMYELVRVGHDNLIGEIIRLEGDSATIQVYEETAGLTVNDPVLRTHKPLSVELGPGILGNIFDGIQRPLKTIAKRSGDVYIPRGVSVPALDKDCLWEFQPKDFVEGDTITGGDLYATVFENSLMQHHVALPPDAMGKITYLAPAGQYSLKDTVLELEFQGVKKSFTMLQTWPVRTPRPVASKLAADTPLLTGQRVLDALFPSVLGGTCAIPGAFGCGKTVISQALSKYSNSDAVVYVGCGERGNEMAEVLMDFPQLTMTLPDGREESVMKRTTLVANTSNMPVAAREASIYTGITIAEYFRDMGYNVSMMADSTSRWAEALREISGRLAEMPADSGYPAYLAARLASFYERAGKVKCLGGPERNGSVTIVGAVSPPGGDFSDPVTSATLSIVQVFWGLDKKLAQRKHFPSVNWLISYSKYSTALESFYEKFDSDFIDIRTKAREVLQREDDLNEIVQLVGKDALAEGDKITLETAKLLREDYLAQNAFTPYDKFCPFYKSVWMMRNIIHFYNLANQAVERGAGMDGQKISYSLIKHRLGDLFYRLVSQKFEDPAEGEDVLVGKFKKLHDDLTSGFRNLEDETR

SEQ ID NO: 1149 - protein, 121 aa, Taraxacum japonicum
ENDNVVGHDTKYNCHLMEKIEKENLLTSQSFSVFLFNSKYELLLQQRSATKVTFPLVWTNTCCSHPLYRESELIAENTLGVRNAAQRKLLDELGIPAEHVPVDEFTPLGRMLYKAPSDGKW

SEQ ID NO: 1150 - protein, 120 aa, Sapium sebiferum
ENDRVVGHASKYNCHLWENILKGNSLHRAFSVFLFNSKYELLLQQRSATKVTFPLVWTNTCCSHPLYRESELIYEDSLGVRNAAQRKLFDELGIPAEDVPVDQFTSLGRILYKAPSDGKW

SEQ ID NO: 1151 - protein, 591 aa, Streptococcus pyogenes
MNQGKIITVSGPLVVASGMQEANIQDICRVGHLGLVGEIIEMRRDQASIQVYEETSGIGPGEPVVTTGCPLSVELGPGLISEMFDGIQRPLDRFQKATDSDFLIRGVAIPSLDRKAKWAFIPKLSVGQEVVAGDILGTVQETAVIEHRIMVPYKVSGTLVAIHAGDFTVTDTVYEIKQEDGSIYQGSLMQTWPVRQSRPVAQKLIPVEPLVTGQRVIDTFFPVTKGGAAAVPGPFGAGKTVVQHQIAKFANVDIVIYVGCGERGNEMTDVLNEFPELIDPNTGQSIMERTVLIANTSNMPVAAREASIYTGITIAEYFRDMGYSVAIMADSTSRWAEALREMSGRLQEMPGDEGYPAYLGSRIAEYYERAGRVRTLGSQEREGTITAIGAVSPPGGDISEPVTQNTLRIVKVFWGLDAPLAQRRHFPAINWLTSYSLYQDDVGSYIDRKQQSNWSNKVTRAMAILQREASLEEIVRLVGLDSLSEQDRLTMAVARQIREDYLQQNAFDSVDTFTSFPKQEAMLTNILTFNEEASKALSLGAYFNEIMEGTAQVRDRIARSKFIPEENLEQIKGLTQKVTKEIHHVLAKGGI

SEQ ID NO: 1152 - protein, 484 aa, Chlamydophila pneumoniae
MITRTKIICTIGPATNSPEMLAKLLDAGMNVARLNFSHGSHETHGQAIGFLKELREQKRVPLAIMLDTKGPEIRLGNIPQPISVSQGQKLRLVSSDIDGSAEGGVSLYPKGIFPFVPEGADVLIDDGYIHAVVVSSEADSLELEFMNSGLLKSHKSLSIRGVDVALPFMTEKDIADLKFGVEQNMDVVAASFVRYGEDIETMRKCLADLGNPKMPIIAKIENRLGVENFSKIAKLADGIMIARGDLGIELSVVEVPNLQKMMAKVSRETGHFCVTATQMLESMIRNVLPTRAEVSDIANAIYDGSSAVMLSGETASGAHPVAAVKIMRSVILETEKNLSHDSFLKLDDSNSALQVSPYLSAIGLAGIQIAERADAKALIVYTESGSSPMFLSKYRPKFPIIAVTPSTSVYYRLALEWGVYPMLTQESDRAVWRHQACIYGIEQGILSNYDRILVLSRGACMEETNNLTLTIVNDILTGSEFPET

SEQ ID NO: 1153 - protein, 631 aa, Caulobacter crescentus
MSKIIGIDLGTTNSCVAIMDGKTPKVIENAEGARTTPSVVAFLEDGERLIGQPAKRQAVTNPTNTLFAIKRLIGRTASDPVVEKDKGMVPYEIVKGPTGDAWVKAHGKDYSPQEVSAFILQKMKEAAEAHLGEPVTKAVITVPAYFNDAQRQATKDAGKIAGLEVLRIINEPTAAALAYGLDKNDGKKIAVYDLGGGTFDVSILEIGDGVFEVKSTNGDTFLGGEDFDLRIVDYLADEFKKEQGVDLRKDKLALQRLREEAEKAKKELSSTAQYEVNLPFISMNASGPLHLNIKLSRAKLEALVDDLIARTIGPCEQALKDAGLKKSDIDEVILVGGMSRMPKVQQAVQDFFGREPHKGVNPDEVVALGAAVQAGVLQGDVKDVLLLDVTPLTLGIETLGGVFTPLIERNTTIPTKRSQTFSTADDNQSAVTIRVFQGERPMAQDNKMLGQFDLVGIPPAPRGVPQIEVTFDIDANGIVQVHAKDKATNKEQSIRIQANGGLSDSDIERMVKEAEANKAADEKKKQLVEAKNQGEAILHSTEKALAEHGDKVGAAEKTAIETGITELKTALEGEDVEAIQAKTQALIQASMKLGEAMYAAQQGSAEGGDAKADDGVVDAEFEEVDDNKPAA

SEQ ID NO: 1154 - protein, 513 aa, Glycine max; identical to SEQ ID NO: 606

SEQ ID NO: 1155 - protein, 420 aa, Staphylococcus aureus
MFKFNEDEENLKCSFCGKDQDQVKKLVAGSGVYICNECIELCSEIVEEELAQNTSEAMTELPTPKEIMDHLNEYVIGQEKAKKSLAVAVYNHYKRIQQLGPKEDDVELQKSNIALIGPTGSGKTLLAQTLAKTLNVPFAIADATSLTEAGYVGDDVENILLRLIQAADFDIDKAEKGIIYVDEIDKIARKSENTSITRDVSGEGVQQALLKILEGTTASVPPQGGRKHPNQEMIQIDTTNILFILGGAFDGIEEVIKRRLGEKVIGFSSNEADKYDEQALLAQIRPEDLQAYGLIPEFIGRVPIVANLETLDVTALKNILTQPKNALVKQYTKMLELDDVDLEFTEEALSAISEKAIERKTGARGLRSIIEESLIDIMFDVPSNENVTKVVITAQTINEETEPELYDAEGNLINNSKTSA

SEQ ID NO: 1156 - protein, 637 aa, Rhodobacter capsulatus
MAKVIGIDLGTTNSCVAIMDGSQPRVIENSEGARTTPSIVAYTDNERLVGQPAKRQAVTNPTNTVFAVKRLIGRRTTDAEVEKDKKLVPYNIVDGGNGDAWVEVRGEKFSPAQVSAVILQKMKETAESYLGETVTQAVITVPAYFNDAQRQATKDAGKIAGLEVLRIINEPTAAALAYGLDKKDSKTIAVYDLGGGTFDISVLEIDDGLFEVKSTNGDTFLGGEDFDMRIVNYLADEFKKEHGVDLTKDKMALQRLKEAAEKAKIELSSASQTEINQPFISMNAATGVPLHMVMKLTRAKLESLVDDLIKASLKPCAAALKDAGVSKDEIDEVVLVGGMTRMPRVVEEVTKFFGKEPHKGVNPDEVVALGAAIQAGVLQGDVKDVVLLDVTPLSLGIETLGGVFTRLIDRNTTIPTKKSQIFSTAEDNQNAVTIRVFQGEREMAADNKMLGMFNLENIPPAPRGVPQIEVTFDIDANGIVSVKAKDKGTGKEQQITIQASGGLSDDDIEKMIKDAEANAEADKKRKELVEAKNTGESLLHSTRKSLEEHGDKVDGSTVEMIELACNALEESLKSEDPGKIKGAVQNLTDAAMKLGEAIYKAQASEAGPASDDEDGPRSVDDDIVDADFEDMGENKRK

SEQ ID NO: 1157 - protein, 623 aa, Daucus carota
MPSVYGDRLTTFEDSEKESEYGYVRKVSGPVVVADGMGGAAMYELVRVGHDNLIGEIIRLEGDSATIQVYEETAGLMVNDPVLRTHKPLSVELGPGILGNIFDGIQRPLKTIAKRSGDVYIPRGVSVPALDKDTLWEFQPKKIGEGDLLTGGDLYATVFENSLMQHHVALPPDAMGKITYVAPAGQYSLKDTVLELEFQGVKKQFTMLQTWPVRTPRPVASKLAADTPLLTGQRVLDALFPSVLGGTCAIPGAFGCGKTVISQALSKYSNSDTVVYVGCGERGNEMAEVLMDFPQLTMTLPDGREESVMKRTTLVANTSNMPVAAREASIYTGITIAEYFRDMGYNVSMMADSTSRWAEALREISGRLAEMPADSGYPAYLAARLASFYERAGKVKCLGGPERNGSVTIVGAVSPPGGDFSDPVTSATLSIVQVFWGLDKKLAQRKHFPSVNWLISYSKYSTALESFYEKFDSDFIDIRTKAREVLQREDDLNEIVQLVGKDALAETDKITLETAKLLREDYLAQNAFTPYDKFCPFYKSVWMMRNIIHFYNLANQAVERGAGMDGQKISYTLIKHRLGDLFYRLVSQKFEDPAEGEDVLVGKFKKLHDDLTSGFRNLEDETR

SEQ ID NO: 1158 - protein, 294 aa, Nicotiana tabacum
MDQYEKVEKIGEGTYGVVYKARDRVTNETIALKKIRLEQEDEGVPSTAIREISLLKEMQHANIVRLQDVVHSEKRLYLVFEYLDLDLKKHMDSSPEFSKDPRLVKMFLYQILRGIAYCHSHRVLHRDLKPQNLLIDRRTNALKLADFGLARAFGIPVRTFTHEVVTLWYRAPEILLGTRHYSTPVDVWSVGCIFAEMVTQRPLFPGDSEIDELFKIFRVMGTPNEDTWPGVTTLPDFKSAFPKWPSKDLATIVPNLDGAGLDLLDKTSRLDPSKRITARNALEHEYFKDIGYVP

SEQ ID NO: 1159 - protein, 293 aa, Nicotiana tabacum
MDQYEKVEKIGEGTYGVVYKARDRVTNETIALKKIRLEQEDEGVPSTAIREISLLKEMQHANIVRLQDVVHSEKRLYLVFEYLDLDLKNTWITTPEFSEDPRLVKMFLYQILRGIAYCHSHRVLHRDLKPQNLLIDRRTNALKLADFGLARAFGIPVRTFTHEVVTLWYRAPEILLGSRHYSTPVDVWSVGCIFAEMVTQRPLFPGDSEIDELSRFRVMGTPNEDTWPGVTTLPDFKSAFPKWPSKDLATIVPNLDGAGLDLLDKIVRLDPSKRITARNALEHEYFKDIGYVP

SEQ ID NO: 1160 - protein, 303 aa, Guillardia theta
MDNYKRIEILGQGAYGKVYKAQDLRNGNLVALKKALSSSDEEGIPPTTLREISILKSVSECEFIVKLLDVVNTKSKNGKISIYIVFQYLDSDLKSYMISNYGKGRGMDENSAKKFCFQLLIGMYHCHKLGIIHRDLKPQNILIEKGEKLKIADFGLSRNFSIPVGKYTHEVVTLWYRAPEILLGARTYSSPVDIWSIGCIFAEMLTGNPLFCGESEIEQLLSIFKTIGTPTSQTWPEVLNFKDWHEFPIWPQINLKYSFENISEETLEFIQVFLRLNPNKRISILGAITNTYFEHFFKDYNLY

SEQ ID NO: 1161 - protein, 333 aa, Sulfolobus solfataricus
MSYNFEEERVIKEIREKNAKRVLLQFPEGLKYFSIDIVKKLREKLPNVNFIISGEPSWGACDIAEDEAQQVNADLIIHFGHTPYTWYYPKFPTIFINAESNLDISENALHSLENDISKYNGRKISLTATLQHVRLLSKIKSFLEDKGYDIVIGKPSNRFMFDGQVLGCDYKAAEVEADIYVIVSGGLFHALGLGLATNKPTIKLDPYLQKSEDITNDVRKILKVRYGKILQALDKRSWVIIQGVKVGQNRPNMIKYFYDKLTEKGYDVFTVTNKVLTLDILRNLDRNYIDVFLVTSCPRLPIDDLYNYEKPVLTPGEAKMIINNSLEPYIFPW

SEQ ID NO: 1162 - protein, 648 aa, Sulfolobus solfataricus
MMKIEKNFGIPLGGIGTGKINFYPDLTIGEITILNNWSNPLRKVRGFHLLTFLDKKPIFLQTNPGKNVETPPQYTYVKDIETFVEFPVIRYSTPLAEIEVYSILRKNDVKNSSLPVIKFRIKGKGRFAISFPNIVGSKRAGRANESYKGKLNGVVMKNEKALNSDPAYGEIFLGCIGCKVITNYAYYKPAKVGMTEDITYFYNLEEYDETYVIKPYAREEIGGIVYKDVDEEETFILSWYFNGRPYHYPYGHYYENFFKDSIDVAEYALKLEPDLGIEEKVEWLKDALVNSLYILTSNTWLTKDGRFAVYEDPFVTKLMNTIGSMTFDGLGFTLLELYRDLVISADNYFMNYVNYGETPHDVGEESIEDPIYGASYPYWWTDLGPTLVLMLYRDYVFTSNREILEKNYNKIKEIIDWLIRKDMDNDCIPDSKGGYDNSYDGTHMYGASSYIASMFLSALTAFIKMSEILDVKIDDKYYRFLECGKKTFNSLWNGKYFILWKKNDEENTSCLNSQLLGQFWCDILGLPPITDHDKINTALRSIYELNFKASKYCLTNAVREDGSVDSSTAQLRSCWPRVSFAVAAHMILRGMVKEGIEVAKREWETIKELNPFDQSSRIDAIDGKYVGLMSYIGSTSVWLLKLALDKIR

SEQ ID NO: 1163 - protein, 534 aa, Oryza sativa; identical to SEQ ID NO: 822

SEQ ID NO: 1164 - protein, 426 aa, Mycobacterium tuberculosis
MARIGDGGDLLKCSFCGKSQKQVKKLIAGPGVYICDECIDLCNEIIEEELADADDVKLDELPKPAEIREFLEGYVIGQDTAKRTLAVAVYNHYKRIQAGEKGRDSRCEPVELTKSNILMLGPTGCGKTYLAQTLATMLNVPFAIADATALTEAGYVGEDVENILLKLIQAADYDVKRAETGIIYIDEVDKIARKSENPSITRDVSGEGVQQALLKILEGTQASVPPQGGRKHPHQEFIQIDTTNVLFIVAGAFAGLEKIIYERVGKRGLGFGAEVRSKAEIDTTDHFADVMPEDLIKFGLIPEFIGRLPVVASVTNLDKESLVKILSEPKNALVKQYIRLFEMDGVELEFTDDALEAIADQAIHRGTGARGLRAIMEEVLLPVMYDIPSRDDVAKVVVTKETVQDNVLPTIVPRKPSRSERRDKSA

SEQ ID NO: 1165 - protein, 638 aa, Mesorhizobium loti
MAKVIGIDLGTTNSCIAIMDGKEPKVIENAEGARTTPSIVAISGDGERLVGQPAKRQAVTNPENTIFAVKRLIGRRYDDPVTEKDKKLVPYKIVKGDNGDAWVEAGGKKQSPSQISAMILQKMKETAEAYLGEKVEKAVITVPAYFNDAQRQATKDAGKIAGLEVLRIINEPTAAALAYGLDKKDGKTIAVYDLGGGTFDISVLEIGDGVFEVKSTNGDTFLGGEDFDMRLVEYLAAEFKKEQGIDLKNDKLALQRLKEAAEKAKIELSSTTQTEINLPFITADATGPKHLTLKLTRAKFESLVEDLVQRTIDPCKAALKDAGLKAGEIDEVVLVGGMTRMPKIQEIVKQFFGKEPHKGVNPDEVVALGAAIQAGVLQGDVKDVLLLDVTPLSLGIETLGGVFTRLIERNTTIPTKKSQVFSTAEDSQSAVTIRVFQGEREMAADNKALGQFDLVGIPPAPRGVPQIEVTFDIDANGIVNVSAKDKGTGKEHQIRIQASGGLSDADIEKMVKDAEANAETDKKRRAVVEARNQAEALVHSSEKSLKEYGDKVSEAERTAISDAIAALKTAAEGDDAADIEAKSQALAEASMKLGQAMYEASQKEAAEADAKADAAKDSDVVDADFEEIDEDDDKKKSA

SEQ ID NO: 1166 - protein, 477 aa, Mesorhizobium loti
MSRQAQAPTIVLFRRDLRMGDNAALAAAAERGVPVVALYILDETTKGLRAMGAASRWWLHHSLAALGDLLRKAGANLFLAHGRTEDAVAKAIDASGANCVFWNRRYDPSEVAVDARLKAALREKGLTALSFDGALLHEPSLLKTGSGGFYKVFTPFWKAMADKVDVRDPIDTPGQIDGWRGELGGLRLDELDLLPSKPDWAYGLRETWTPGEKGAQARLGQFIEHGLANYERQRDYPGQPSTSRLSPHLTFGEITPFQIFAALRRSKSSGTSKFRAEIGWREFSYHLLFHNPDLSGRNFRPEFDAMSWRDDIRALRTWQRGLTGYPIVDAGMRELWRTGWMHNRVRMIVASFLIKDLMIDWRHGEKWFWDTLVDADAANNPASWQWVAGSGADPAPYFRIFNPVLQGEKFDPHGDYVRQHVPEISALPDRYIHRPWEAPAAVLKDKGIVLGKTYPNPIVDHGAARERALIVYQSLKD

SEQ ID NO: 1167 - protein, 275 aa, Mesorhizobium loti
MLGFQTATDVTNFRRSVRATGSTTFDINGAAKSNGRTVLSRSFPIGIDVDAFARMANDAASDVQIDSMRRQILGLKQIIGVDRLDYSKGLPGRIQAFARLLERHPEHERTVTYLQIAPPTREEVGAYAEIRAQLEATAGSVNGKYADLTWTPIRYIHRTVPRSRLAGLLRASQVGLVAPLRDGMNLVAKEYIAAQDPADPGVLVLSRFAGAAEELAHSLIVNPYVVDEVADAIAKALGMPLEERIARHGALIERIRRNDAAQWRKSFLEALADSS

SEQ ID NO: 1168 - protein, 336 aa, Arabidopsis thaliana
MAKSLNILIAALSLIAFSPFCLCSKAYGSGGYLFPQFYDQSCPKAQEIVQSIVAKAFEHDPRMPASLLRLHFHDCFVKGCDASILLDSSGTIISEKRSNPNRNSARGFELIEEIKHALEQECPETVSCADILALAARDSTVITGGPSWEVRLGRRDARGASLSGSNNDIPAPNNTFQTILTKFKRQGLDLVDLVSLSGSHTIGNSRCTSFRQRLYNQSGNGKPDMTLSQYYATLLRQRCPRSGGDQTLFFLDFATPFKFDNHYFKNLIMYKGLLSSDEILFTKNKQSKELVELYAENQEAFFEQFAISMVKMGNISPLTGAKGEIRRICRRVNHAY

SEQ ID NO: 1169 - protein, 807 aa, Oryza sativa; identical to SEQ ID NO: 708

SEQ ID NO: 1170 - protein, 168 aa, Oryza sativa
SSNIDCGVSIGTIFGIYMIKDKENVTLEDVLQPGKNMVAAGYCMYGSSCTLVLSTGNGVNGFTLDPSLGEFILTHPDIKIPKKGKIYSVNEGNAKNWDEPTAKFVEKCKFPKDGSSPKSLRYIGSMVADVHRTLLYGGVFLYPADKKSPNGKLRVLYEVFPMSFLMEQ

SEQ ID NO: 1171 - protein, 324 aa, Brassica napus
MTNVTGDRNGDGRSTAVTESSPPSDPPIRVYADGIYDLFHFGHARSLEQAKKSFPNTYLLVGCCNDDTTHKYKGKTVMNDQERYESLRHCKWVDEVIPDAPWVINQEFLDKHRIAYVAHDALPYADASGAGKDVYEFVKKVGRFKETKRTEGISTSDIIMRIVKDYNQYVMRNLDRGYSREDLGVSFVKRLRVNMRLKKLQEKVKEQQEKVGEKIQTVKMVRNEWVENADRWVAGFLEMFEEGCHKMGTAIRDRIQEKLMRQESKELLEKGQNGQREDTEEQFYEEYFEHDIVDSCEDNEDDEEEYYDEIEEQCSSASKALKSN

SEQ ID NO: 1172 - protein, 326 aa, Brassica napus
MTNVTGDRNGDGRSTAVTESSPPSDPPIRVYADGIYDLFHFGHARSLEQAKKSFPNTYLLVGCCNDDTTHKYKGKTVMNDQERYESLRHCKWVDEVIPDAPWVINQEFLDKHRIAYVAHDALPYADASGAGKDVYEFVKKVGRFKETKRTEGISTSDIIMRIVKDYNQYVMRNLDRGYSREDLGVSFVKEKRLRVNMRLKKLQEKVKEQQEKVGEKIQTVKMVRNEWVENADRWVAGFLEMFEEGCHKMGTAIRDRIQEKLMRQESKELLEKGQNGQREDTEEQFYEEYFEHDIVDSCEDNEDDEEEYYDEIEEQCSSASKALKSN

SEQ ID NO: 1173 - protein, 329 aa, Brassica napus
MSNVTADPTTDGPSTAVAVSGSAAIQASPPTDRPVRVYADGIYDLFHFGHARSLEQAKKSFPNTYLLVGCCNDETTHKYKGRTVMTAEERYESLRHCKWVDEVIPDAPWVINQEFLDNHRIDYVAHDSLPYADTSGAGKDVYEFVKKVGRFKETMRTEGISTSDIIMRIVKDYNQYVMRNLDRGYSREDLGVSFVKEKRLRVNMRLKKLQERVKEQQEKVGEKIQTVKMLRNEWVENADRWVAGFLEIFEEGCHKMGTAIRDSIQERLIRQIPRKKLENGEDDDTDDQFYEEYFDHDMGSDEDEDERYYDEEEDVEEEKSVKKDAQDNK

SEQ ID NO: 1174 - protein, 331 aa, Brassica napus
MSNVTADPTADGPSTAVAVSNSTAIQTSPPTDRPVRVYADGIYDLFHFGHARSLEQAKKSFPNTYLLVGCCNDETTHKYKGRTVMTAEERYESLRHCKWVDEVIPDAPWVINQEFLDNHRIDYVAHDSLPYADTSGAGKDVYEFVKKVGRFKETMRTEGISTSDIIMRIVKDYNQYVMRNLDRGYSREDLGVSFVKEKRLRVNMRLKKLQERVKEQQEKVGEKIQTVKMLRNEWVENADRWVAGFLEIFEEGCHKMGTAIRDRIQERLIRQIPRNRLENGQDDDTDDQFYEEYFDHDMGSDEDEEERYYDEEEDVEEEKYKTVKPDAKDDK

SEQ ID NO: 1175 - protein, 206 aa, Ralstonia eutropha
LQPGSAQVAAGYALYGPTTMLVLTVGNGVNGFTLDPNLGEFFLTHPHLRVPPDTQEFAINASNSRFWEAPVQRYIGECMAGKSGPRGKDFNMRWIASMVAEAHRILMRGGVFMYPRDTKDPAKPGRLRLLYEANPIAFLMEQAGGRASTGRQTLMSVAPGALHQRIGVIFGSRNEVERIEGYHTNQTDPDLPSPLFNERSLFRASA

SEQ ID NO: 1176 - protein, 159 aa, Ralstonia eutropha
LQVPADTQEFAINASNSRFWEAPVQRYIAECMAGKSGPRGKDFNMRWIASMVAEAHRILMRGGVFMYPRDSKDPAKPGRLRLLYEANPIAFLMEQAGGRASTGRQTLMSVAPGALHQRIGVIFGSRNEVERIEGYHTDQTDPDLPSPLFNERSLFRASA

SEQ ID NO: 1177 - protein, 1444 aa, Arabidopsis thaliana
MDRNREARRVPMAAAGNGLSRRRHRAGSFRDSPEEEGPVELPEAARLRDRGGSNKKDRDRERDRDRERERERDRERDRLNSRSKRRRGERLMMVHGNLDDGGDDSSEESVNDDEEYDDGGVGPPSSLKMLPPTSNNISAASFSSSLSNHHNGGSGNLHHHHHSHNNNHQRKNNFPPTKVFRSSPSPAPVSPLVSTWKAADEMIGVSVPRKARSACTKRPHESWASSTTGGGVFASGEQIHRQISSTSPANRVSPASILASPSPPAPTSPSSSSISVRKKLPSGTKQKPLPPKSSSSKLSSPVAVQDEIEIEIAEVLYGMMRMPSTSKQEAAGNDLTEAAKSTVEVKSRVSSPISNPQTLPQSSITLAANSSSSNVSAIAPKRKKPRHVKYEDDNSSRVTTIKSEAEAPSKSQVPFSNQLKSSGSGEGNSSVLDSIIPLTRESNASLDSEKKENNLSKDETILPKVESSSGFRSDGEGAKSSSPEKEKFEIDLMAPPPVRSSSERGGEMMECVAAEAKPKVTEVETEAKPLLKEDRSDPAIHDSQEKKRPRMVAEAEHHKFERNCELKLDLDKSDHVGLVNKHHVQKPPPQQQLSVPDKTAQASHLPLHMSMPGWPGGLPTMGYMAPTQGVVPTDTSSLSAAAMQPPPHLLFNQPRPKRCATHCYIARNIQSHQQFTKMNPFWPAAAGSAPMYGTKACNLSLMPPTELQGSVLGRSSNPVQDKNSQSTSKSSETAQRNQLMLQQALPPGAANSILHGPTFIFPLGQQPHAAATIAAASVRPPNSGITSSGPTATSTSMNGSASATPAGAPTMSFSYPAMPGNETQYLAILQNNGYPFPVPAHVGAQPAYRGAPGQPMPFFNGSFYSSQMIQPPHHQPQKQHQQQLTGQMLQSHAPNNQNGSASTGSSAAQKHLQNQQLRPPINHGNSQGFPTHKVQSQPLNFQQRQQPRENATQHSETVGEDSPSTADSRGSRSNVAYGQNYGMQMQPTNLGLMSSPAPGGGVVGSSSSHGEKKSQQQVSKAGVESFQSPGYAMTFATFNGANTAPTLNMSSIAQNHAMFHSMPEAARQGYQMMAAQAAQQKMNYGASLEDGKSGSIGGAATANNTPEEQRKSGGGAIGKTSGGNGGQSIAFSNKQDLADASVSAVTSGSIVDSSSRLLNLGSALPQSSGSLPTSHHQQLLQQQQQQHMQRSQSQQPYTTMYLQKQQRYATSVAASAARTKGPVVSNGSGFPDHNMTTSPAGTTKFANANSGFPQNLVQSSSNQVQSQQWKNNSPRTTNTTQAQSPSMLSPSTSVAAASSLRNIPHKQQSRPQQSQISFAANSKPMTSGSPMQQVQGGTNHQAPSPPMLVGSPSTSSVSKNASGSPRTTASASSAANKGGQASTTTHSASQPSKNLQPASAASSAGGRNNGPSVLGNPTTSSGSKSQQQQQLPKHGLQPSTAILL

SEQ ID NO: 1178 - protein, 121 aa, Lactococcus lactis
MALNIENIVAELENATILELSELVKAIEEKFDVTAAAPVAAAAGAGDAAAAKDSFDVELTSAGDKKVAVIKEVRGITGLGLKEAKELVDGAPTMIKEGLSESEANEVKEKLEAAGASITLK

SEQ ID NO: 1179 - protein, 121 aa, Bacillus halodurans
MSKDQIIEAIKEMTVLELNDLVKAIEEEFGVTAAAPVAVAGGAAAEGGAAEKTEFDVVLESAGGSKINVIKVVREITGLGLKEAKALVDGAPAPIKEGVAKEEAEEMKAKLEEAGASVELK

SEQ ID NO: 1180 - protein, 124 aa, Candidatus Liberibacter
  misc_feature (46)..(47): Xaa can be any naturally occurring amino acid
MSDIESIVEKLSSLTLIQAAELSKRLEEEWGVSASAPVAAVAPAVXXDVAVAEKTEFEVFLESFDAKSKISVIKEVRSITDLGLKEAKELVEALLKSLRTGVSKDEANELKKKLEAAGATISLR

SEQ ID NO: 1181 - protein, 122 aa, Deinococcus radiodurans
MAYDKQALIDQLGQLTIMELADLIDGLKETWGVTAAVAVSGGGAGAASPAAEEKTEFDVVLIDAGASKINVIKEIRGITGLGLKEAKDMSEKGGVLKEGVAKDEAEKMKAQLEAAGARVELK

SEQ ID NO: 1182 - protein, 440 aa, Azotobacter vinelandii
MDKTDKPCCSFCGAEKSPTVPLIAGNDGRICEACVKLAHQVVSSWGQRRKNQQLAPQLRTPVEYKKHLDESVIGQEAAKETLSVAVYNHYLRLLNCDREPVCQLGEQVELEKSNILMAGPSGTGKTLLVRTLARILGVPFAMADATTLTQAGYVGDDVDSIITRLLDAAGGDVQQAQWGIVYIDEVDKLAKRSGGGTAVRDISGEGVQQALLKMVEGTEVRISKSGRRNEHSEEQVVDTRNILFIAGGAFPGLEALVSSRIQPKNTGIGFHAQPRREAPSINELMASLLPDDLHEFGLIPEFIGRFPIITFLQELDHATLLRILTEPRNALVKQYKQLFAYQGVELVITDAALNYIADQALIRKTGARGLRAVLEAALQQTMFNMPSQPQLRGCTLDLVEHEDGGRSLEVLTRLAEDGSGRIQPDPSPVVEEKSALSADL

SEQ ID NO: 1183 - protein, 324 aa, Azotobacter vinelandii
MAGPSGTGKTLLVRTLARILGVPFAMADATTLTQAGYVGDDVDSIITRLLDAAGGDVQQAQWGIVYIDEVDKLAKRSGGGTAVRDISGEGVQQALLKMVEGTEVRISKSGRRNEHSEEQVVDTRNILFIAGGAFPGLEALVSSRIQPKNTGIGFHAQPRREAPSINELMASLLPDDLHEFGLIPEFIGRFPIITFLQELDHATLLRILTEPRNALVKQYKQLFAYQGVELVITDAALNYIADQALIRKTGARGLRAVLEAALQQTMFNMPSQPQLRGCTLDLVEHEDGGRSLEVLTRLAEDGSGRIQPDPSPVVEEKSALSADL

SEQ ID NO: 1184 - protein, 122 aa, Staphylococcus aureus
MANHEQIIEAIKEMSVLELNDLVKAIEEEFGVTAAAPVAVAGAAGGADAAAEKTEFDVELTSAGSSKIKVVKAVKEATGLGLKDAKELVDGAPKVIKEALPKEEAEKLKEQLEEVGATVELK

SEQ ID NO: 1185 - protein, 414 aa, Staphylococcus aureus
MSQNKRVVITGMGALSPIGNDVKTTWENALKGVNGIDKITRIDTEPYSVHLAGELKNFNIEDHIDKKEARRMDRFTQYAIVAAREAVKDAQLDINDNTADRIGVWIGSGIGGMETFEIAHKQLMDKGPRRVSPFFVPMLIPDMATGQVSIDLGAKGPNGATVTACATGTNSIGEAFKIVQRGDADAMITGGTEAPITHMAIAGFSASRALSTNDDIETACRPFQEGRDGFVMGEGAGILVIESLESAQARGANIYAEIVGYGTTGDAYHITAPAPEGEGGSRAMQAAMDDAGIEPKDVQYLNAHGTSTPVGDLNEVKAIKNTFGEAAKHLKVSSTKSMTGHLLGATGGIEAIFSALSIKDSKVAPTIHAVTPDPECDLDIVPNEAQDLDITYAMSNSLGFGGHNAVLVFKKFEA

SEQ ID NO: 1186 - protein, 585 aa, Staphylococcus aureus
MRKTKIVCTIGPASESEEMIEKLINAGMNVARLNFSHGSHEEHKGRIDTIRKVAKRLDKIVAILLDTKGPEIRTHNMKDGIIELERGNEVIVSMNEVEGTPEKFSVTYENLINDVQVGSYILLDDGLIELQVKDIDHAKKEVKCDILNSGELKNKKGVNLPGVRVSLPGITEKDAEDIRFGIKENVDFIAASFVRRPSDVLEIREILEEQKANISVFPKIENQEGIDNIAEILEVSDGLMVARGDMGVEIPPEKVPMVQKDLIRQCNKLGKPVITATQMLDSMQRNPRATRAEASDVANAIYDGTDAVMLSGETAAGLYPEEAVKTMRNIAVSAEAAQDYKKLLSDRTKLVETSLVNAIGISVAHTALNLNVKAIVAATESGSTARTISKYRPHSDIIAVTPSEETARQCSIVWGVQPVVKKGRKSTDALLNNAVATAVETGRVSNGDLIIITAGVPTGETGTTNMMKIHLVGDEIANGQGIGRGSVVGTTLVAETVKDLEGKDLSDKVIVTNSIDETFVPYVEKALGLITEENGITSPSAIVGLEKGIPTVVGVEKAVKNISNNMLVTIDAAQGKIFEGYANVL

SEQ ID NO: 1187 - protein, 491 aa, Populus tremula
MATDKAVETVIVGNYVEMETEGKPKDMKARFSKFLWHGGSAYDAWFSCASNQVAQVLLTLPYSFSQLGMLSGICFQLLYGLLGSWTAYLISVLYIEYRTRKEREKVDFRNHVIQWFEVLDGLLEKYWRNVGLAFNCTFLLFGSVIQLIACASNIYYINDNLDKRTWTYIFGACCATTVFIPSFHNYRMWSFLGLVMTTYTAWYLTIASLLHGQVEGVKHSGPTKIVLYFTGATNILYTFGGHAVTVEIMHAMWKPQKFKAIYLLATLYVLTLTLPSAAAVYWAFGDMLLNHSNAFSLLPRSPSRDMAVILMLIHQFITFGFACTPLYFVWEKAIGMHECKSLCKRAAARLPVVIPIWFLAIIFPFFGPINSTVGSLLVSFTVYIIPALAYMFTFKSSAARENAVEQPPKYMGRWVGTYVMNSFVVVWVLIVGFGFGGWASVTNFVHQIDTFGLFTKCYQCPPPTMAPSLPHLNATAAPPPLHHGHNLTHSP

SEQ ID NO: 1188 - protein, 456 aa, Coriandrum sativum
MQSLLQSSFTPTFRLPKPCHHIPRPPRKLSVFATSASPKREKDPKKRVVVTGLGVVSVFGNDVDTYYDKLLAGESGVDFIDRFDASEFPTRFAAQIRAFSSEGYIDSKNDRRLDNCLRYNIVAGKKALENAGLGEDMRSKIDKERAGVLVGSGMGGITAFCDGVENLITKGYKKISPFFIPYTITNMGSALLAIDLGFMGPNYSIVAACATSNYAFYAAANHIRSGEADLMLAGGAEAAIVPVGLGGFTSCRAMSQRNDNPKAASRPWDKDRDGLVMGEGAGVLVMESLVHAMKRGAPIIAEYLGGAVTCDAHHMTDPRPDGGGVSMCIQSGLQEAGVVSPEEVNYINAHATSTLAGDLKEVTAIKQVLGQIKANATKSMNAHCLGAASGLEAVATVKAIATGWLHPTINQVNLEPEVDFDTVANKKQQHEVNVGISNSFGFGGHNSVVVFSAFNP

SEQ ID NO: 1189 - protein, 438 aa, Bacillus sphaericus
MRKTKIVCTIGPASESSETLEKLIEAGMNVARLNFSHGSHEEHAGRIHLIREVAQKLNKPVGILLDTKGPEIRTHNMKNGELHLTAGQVIDISMTEVEGTETSFSVTYEQLVEDVEQNSIILLDDGLIQLRVLATDVEKGLIHTIVENAGVLKNKKGVNVPGVSVQLPGITEKDAQDILFGIEQGVDFIAASFVRRAKDVLEIRELLEQNGGGHIQIIPKIENQEGVDNIDEIILVSDGLMVARGDLGVEIPAEEVPLVQKKLILKCNQVGKPVITATQMLDSMQRNPRPTRAEASDVANAIIDGTDAIMLSGETGAGLYPVESVQTMNKIAQRTENSLDYKSIVSTRSREKEANMTEAISQAVAYTSINLGVKAVLAPTESGNTARMIAKYRPGVPIVAVTGSTNTAQTLTLVWGVHPIVCQRVTTTDEILELAVDE

SEQ ID NO: 1190 - protein, 407 aa, Pisum sativum
MAAATASSQLIFSKPYSPSRLCPFQLCVFDAKSVLSSSRRKHVNGSGVRCMAVKEATSETKKRSGYEIITLTSWLLQQEQKGIIDAELTIVLSSISMACKQIASLVQRANISNLTGTQGAVNIQGEDQKKLDVISNEVFSNCLRSSGRTGIIASEEEDVPVAVEESYSGNYIVVFDPLDGSSNLDAAVSTGSIFGIYSPNDECLPDFGDDSDDNTLGTEEQRCIVNVCQPGSNLLAAGYCMYSSSVIFVLTIGKGVFVFTLDPLYGEFVLTQENLQIPKSGKIYSFNEGNYKLWDENLKKYIDDLKEPGPSGKPYSARYIGSLVGDFHRTLLYGGIYGYPRDKKSKNGKLRLLYECAPMSFIVEQAGGKGSDGHQRVLDIQPTEIHQRVPLYIGSTEEVEKVEKYLA

SEQ ID NO: 1191 - protein, 296 aa, Petroselinum crispum
ERALDGQIKEIVYKGTHDHPKPQPSRRFTAGALISIQEEKAVNASSLTGQGDTTYSQTLSADQNGTPLSSPRGVNADNVDGASPLLNSVTDDIDNDDQFMKRRRTDVGSIDISPVVKPIREPRVVVQTLSEVDILDDGYRWRKYGQKVVRGNPNPRSYYKCTNAGCPVRKHVERASHDPKAVITTYEGKHNHDVPAAKTNSHDVSGSAPISGMSRVRPEDCSPISLDLGVGMNYGVENNGYEQQTTLGSEHVRSQVQASTAPTCYGVANGGIILYGSRDNHVENHNFESPPLGQFS

SEQ ID NO: 1192 - protein, 514 aa, Thermoplasma volcanium
MHMAAVLEEDALSILGLERVNSGIYDGEWKKPAGKMLTVYSPIDGSEIAKISMATREDYDEMVKKAQEEFKKWRMIPAPKRGLIIKDIGDELRKEKRNLGRIVTIEAGKTPSEGEGEIQEMIDISDLALGLSRQLYGLTIASERPYHRMYEQWVPLGPIAVITSFNFPASVWSWNSFIAAVTGDVVIWKPSSKAALTAVAVMKVIERVLKRNNVPNIFYLMVSSGSEGGDWITNDPRIPLVSFTGSVPVGRKISENVAKRLGKSILELGGNNGAIVSDKADIDLALRGVVFGALATAGQRCTTTRRVIVSEKIYDEFVKKLVNAYSKVKVGDPREKGVLVGPLIDEDAVRDYEGAISEAVKQGGKVLYGGKKISLKGYEKGHYVEPTIIEANPNMPIVKEETFAPILYVMKYKTIEEALEIHNSVPQGLSSSIFTTDLREEEAFLSPYGSDCGLANVNTSTAGAEIGGAFGGEKDTGGGRESGSDAWKFYMRRQTVTKNWGQTLPLAQDVVFDF

SEQ ID NO: 1193 - protein, 428 aa, Thermoplasma volcanium
MPRVYIGSLRELNHNDNVEIYGWLQDLKLLKNVSFLIMRDRTGTVQVTFKNTPDIVNLLKELPRESVLKISGKINKKSVSKSGLEVSGESVEVLNRSERPLPLPVIDPVQADLETRLNNRFIDLRKRDVSSIFNAESSILWGIREFLHSQGFIEVHTPKIVAAATEGGADLFPVKYFENDAYLNQSPQLYKEILMSSGFEKVFEVGPAFRAEEHNTTRHLNEFTSIDIEMSFADHNDAMRILENAVKSGIENMINENGKDLQENGINISIPEIPFPRITYKECIKLLEKEGLEFQFGNDFSPEELRIIGRNFKDFYFITEWPSSLRPFYTMPNRDDPTITNSFDLQYREVEVTSGAQRVHDPDLLLKRFNEKKLNIDSFKFYIQAFKYGMPPHAGWGLGLERLTMIVLGLNNIRETTLFPRDRTRIIP

SEQ ID NO: 1194 - protein, 440 aa, Arabidopsis thaliana
MRSLKLLLCWISFLTLSISISASSDDQFTLDGTVLELTDSNFDSAISTFDCIFVDFYAPWCGHCKRLNPELDAAAPILAKLKQPIVIAKLNADKYSRLARKIEIDAFPTLMLYNHGVPMEYYGPRKADLLVRYLKKFVAPDVAVLESDSTVKEFVEDAGTFFPVFIGFGLNESIISGLGRKYKKKAWFAVSKEVSEDTMVSYDFDKAPALVANHPTYNEHSVFYGPFEDGFLEEFVKQSFLPLILPINHDTLKLLKDDERKIVLTIVEDETHESLEKLYKALRAAAHANRDLVFGYVGVKQFEEFVDSFHVDKKTNLPKIVVWDGDEEYDQVTGIETITQEEDHLTQVSRFLEGYREGRTEKKKINGPSFMGFINSMIGIRSVYILVFLVAVIMMLRSLGQVEEPTGVRTATAVRERVDQATTVPEDESSEHKPSDKKED

SEQ ID NO: 1195 - protein, 483 aa, Amanita muscaria
MSSGGLVSALSGFKKSLNFTWIGWPGFFIPPKDRPLVNKRLMDQYSCQAVYLDDDVADKHYNGFSYSILWPLFHYHPGEMNFDEENWLAYRQANLQFAEAVLQQLTPGAMVWVQDYHLMLLPMLLRGLIEGRDLGADLSITELSEIGEGAEEGIQNAKNLHGVKMGFFLHTPFPSSEIYRILPVRREILLGILYCDLIGFHTYDYARHFLSSCTRILGLPTMPNGVEFEGRMAHVGTFPIGIEPSSFIENLKKDSVTARITQLEHRFNGVKVIVGVDRLDYIKGVPQKLHALELFLTQHPEWIGKVVLVQLAVPSRQDVEEYQNLRSTVNELVGRINGRFGTVEFMPIHFMHKSLPFDELCALYAVSDVCLVSSTRDGMNLVSYEYVACQQARQGVMILSEFAGAAQSLNGSIVVNPWDSQQVADAIHEAVTMDAPTRSENHKKLFKYVNKYSAAFWGSSFIKEMARIKAIEVNKGAKEDAAV

SEQ ID NO: 1196 - protein, 1109 aa, Ipomoea nil
MKVAVNTFLLFLCSTSSIYAAFALNSDGAALLSLTRHWTSIPSDITQSWNASDSTPCSWLGVECDRRQFVDTLNLSSYGISGEFGPEISHLKHLKKVVLSGNGFFGSIPSQLGNCSLLEHIDLSSNSFTGNIPDTLGALQNLRNLSLFFNSLIGPFPESLLSIPHLETVYFTGNGLNGSIPSNIGNMSELTTLWLDDNQFSGPVPSSLGNITTLQELYLNDNNLVGTLPVTLNNLENLVYLDVRNNSLVGAIPLDFVSCKQIDTISLSNNQFTGGLPPGLGNCTSLREFGAFSCALSGPIPSCFGQLTKLDTLYLAGNHFSGRIPPELGKCKSMIDLQLQQNQLEGEIPGELGMLSQLQYLHLYTNNLSGEVPLSIWKIQSLQSLQLYQNNLSGELPVDMTELKQLVSLALYENHFTGVIPQDLGANSSLEVLDLTRNMFTGHIPPNLCSQKKLKRLLLGYNYLEGSVPSDLGGCSTLERLILEENNLRGGLPDFVEKQNLLFFDLSGNNFTGPIPPSLGNLKNVTAIYLSSNQLSGSIPPELGSLVKLEHLNLSHNILKGILPSELSNCHKLSELDASHNLLNGSIPSTLGSLTELTKLSLGENSFSGGIPTSLFQSNKLLNLQLGGNLLAGDIPPVGALQALRSLNLSSNKLNGQLPIDLGKLKMLEELDVSHNNLSGTLRVLSTIQSLTFINISHNLFSGPVPPSLTKFLNSSPTSFSGNSDLCINCPADGLACPESSILRPCNMQSNTGKGGLSTLGIAMIVLGALLFIICLFLFSAFLFLHCKKSVQEIAISAQEGDGSLLNKVLEATENLNDKYVIGKGAHGTIYKATLSPDKVYAVKKLVFTGIKNGSVSMVREIETIGKVRHRNLIKLEEFWLRKEYGLILYTYMENGSLHDILHETNPPKPLDWSTRHNIAVGTAHGLAYLHFDCDPAIVHRDIKPMNILLDSDLEPHISDFGIAKLLDQSATSIPSNTVQGTIGYMAPENAFTTVKSRESDVYSYGVVLLELITRKKALDPSFNGETDIVGWVRSVWTQTGEIQKIVDPSLLDELIDSSVMEQVTEALSLALRCAEKEVDKRPTMRDVVKQLTRWSIRSYSSSVRNKSK

SEQ ID NO: 1197 - protein, 648 aa, Arabidopsis thaliana
MASTEALLPVTSLQDPLSESRSDQIPETRRRRPIKVHLAVYSGLLLIALYVTLIVTHDGSKAEIATESRPRMAGVSEKSNDGVWISSDDGKVEAFPWNNTILSWQRTAFHFQPEKNWMNDPNGPLFYKGWYHFFYQYNPNAAVWGDIVWGHAVSKDLIHWLYLPIAMVPDQWYDANGVWTGSATFLDDGSIVMLYTGSTDEFVQVQNLAYPEDPSDPLLLKWVKFSGNPVLVPPPGIGAKDFRDPTTAWKTSSGKWRITIGSKINRTGISLIYDTTDFKTYEKHETLLHQVPNTGMWECVDFYPVSKTQLNGLDTSVNGPDVKHVIKASMDDTRIDHYAIGTYDDSNATWVPDNPSIDVGISTGLRYDYGKYYASKTFYDQNKGRRILWGWIGESDSEAADVQKGWSSVKGIPRTVVLDTRTHKNLVQWPVEEIKSLRLSSKKFDMTIGPGTVVPVDVGSATQLDIEAEFEIKTDDLKLFFDDDSVEADNKFSCETNGGSTARGALGPFGFSVLADEGLSEQTPVYFYVTKGKHSKLNTVFCTDTSRSTLANDVVKPIYGSFVPVLKGEKLTMRILVDHSIVEGFAQGGRSCITSRVYPTKAIYGATKLFLFNNAIDATVTASFTVWQMNNAFIHPYSSDDLGVPSST

SEQ ID NO: 1198 - protein, 463 aa, Sinorhizobium meliloti
MSRLVIVSNRVPVPDKGGIAPAGGLAVALKVALEEHGGIWMGWSGRSSGENEPEPLAQLHQGNITYALTDLTDTDVGEYYHGFANRVLWPICHYRLDLAEYGRKEMAGYFRVNRFFAHRLAPLVRPDDVIWVHDYHLIPLAAELRQMGLKNRIGFFLHIPWPPADVLFTMPVHEEIMRGLSHYDVVGFQTDHDLENFAGCLRREGIGDELGGGRFSAYGRVFKGGIYAIGIETAAFAEFAKKALTNKTVRKARESIEHRSLIIGVDRLDYSKGITQRIDAFERFILANPAQQGRVTYLQITPKSRSEVPEYEAMQRTVAEQAGRVNGALGAVDWVPIRYINRSVGRHILAGLYRLGKVGLVTPLRDGMNLVAKEYVAAQDPDDPGVLVLSRFAGAARDLKGALLVNPYDIEGTANAMARALSMPLEERKDRWKTMMDHLLEHDVSRWCRDFLNDLATSPDPSG

SEQ ID NO: 1199 - protein, 414 aa, Vibrio cholerae
MSKRRVVVTGMGMLSPVGNTVESSWKALLAGQSGIVNIEHFDTTNFSTRFAGLVKGFDCEQYMSKKDARKMDLFIQYGIAAGIQALEDSGLEVNEENAARIGVAIGSGIGGLELIETGHQALIEKGPRKVSPFFVPSTIVNMIAGNLSIMRGLRGPNIAISTACTTGLHNIGHAARMIAYGDADAMVAGGAEKASTPLGMAGFGAAKALSTRNDEPQKASRPWDKDRDGFVLGDGAGIMVLEEYEHAKARGAKIYAEVVGFGMSGDAYHMTSPSEDGSGGALAMEAAMRDAGVTGEQIGYVNAHGTSTPAGDVAEVKGIKRALGEAGTKQVLVSSTKSMTGHLLGAAGSVEAIITVMSLVDQMVPPTINLDNPEEGLGVDLVPHVARKVESMEYAMCNSFGFGGTNGSLIFKRM

SEQ ID NO: 1200 - protein, 1209 aa, Chlamydomonas reinhardtii
MSTTHPPERGLVALIKGLTIGNVPALQPDVLELYAELKGAYEAQERAAPREYAGDQDEDVKQACKQASLLFVARVLSAAQKKEKDGSETQPSNLGLSISRIVAVAGINLLDFFREVHVVVSELSAYFESRGSSSKQFSQQALLKENSETVVVMGLLAKKYKDNFNTFLHQLDFYKQVVLRLGWSAFLVLRVKLLSAFPDVVSCVELLPCIFAILASHAPRLPDCLTHITREDRGKFLLKSMADTCKADYGRVQARMPSVEALLTQVFTSAVPEWRTAVAEAKAKALSDASGPAAVGGVDLVASPVLEGLVTDTDRMNRVVAALEREYEQHYSRGATELDEREFLSTDFTKFASPRFSPGHMHSTMAKLRSGSMPLRSGGPLGPGLHTATPAHPGPQQLHLVPLGLHSPLPMMHLNAGPGVPGTPISEAMGASAWLRGVTSNMVAEPSPTLQRFLAALPINSNSSGPTPVQQLMKRVRDLVASVIPDEAAPSLLGPFPLLNTSLGVERRIEATKLYCHSLDTILQNEQRTNGLPAALALLGSAKFQRGLIACCIEVVAACYRMVSCAFPNVLDALRIKAFDMANIIGTFVKSIATLPRELKRHLFLIEEKILECLAWEPGSSLYHLIVNVHTENEAAAAAAAAAMQEAAATAACSAASGDDSQHDGAGSRAGLSSSSGGAGAAAAAEGGAGGGTEQPGASSSHNTEQSGGAPPMETAEGGAPGAATSAPPSTTSAAPAEPAPPAAASPAAPAASHAPPPSPKRSQGVAFSGMMSPAKKARGTDGGAHSTQSYIESLPNAVGFPPAAGAAQGQAGLLFEFLRKVLKLTSFRLALLCENFDFSPLEGPEVNSKVYEAIEHALYKQTHLFYNRHIDQIMLSTLYGYCKVHKLSQVSFREIIAQYRKQPQAQQSIFRSVVIDQVLPTLQIQSRADIIGFYNAVFVPAMRNFLLKSESNGSGASGPGLGGDSKHAAAGNSGNAVGAAAGAAPAQGVGATSAMPPGLPPLPPRASQSPRGPKLPLLGAIAAAPRMLGRSATGNARGGGERELGMPLLHPLLPTGSSTGGGALSPTKGSEGSGHPTPTGPVPVSRSSNGGRGGSGGRGGGRGSAEHKIPEGLAALLQALDSQKAAEENTAEEEEEEEEVDADEEQPQARVTRSGRTARDRSTGRERRGRHTEARDDMDEASMDAEFSQQTVVTGRRQRTPNRRYGAD

SEQ ID NO: 1201 - protein, 485 aa, Zygosaccharomyces rouxii
MTVSKKDSGKTSPGNIVVVSNRLPVTISKNAMGKYEYKFSSGGLVTALQGLKKTSTFQWYGWPSLEIPDDEKPVVKKDLLEKFNAIPIFLSDEIADLHYNGFSNSILWPLFHYHPGEINFDENAWLAYNEANATFASEICGNLQDNDLVWVHDYHLMLLPEMLSAHIQRKGLKNIKLGWFLHTPFPSSEIYRILPVRQEILNGVLSCDLIGFHTYDYARHFLSSIQRCLNVNTLPNGVEYQGRFVNVGAFPIGIDVDTFKEGLQKENVKQRIRTLQERFKGCKIMVGVDRLDYIKGVPQKLHAMEVFLNEHPEWIGKVVLVQLAIPSRGDVEEYQYLRSVVNELVGRINGQFGTIEFVPIHFMHKSIPFEELISLYAVSDACIVSSTRDGMNLVSYEYIACRKKGSLILSEFTGAAQSLNGALIVNPWNTDELSDSINEALTLPDEKKDSNWEKLYKYISKYTSAYWGENFVHELNATGTIKTGQ

SEQ ID NO: 1202 - protein, 1187 aa, Arabidopsis thaliana
MSKFGELNPAFSGAGRSSSNNNPDASFNSAPFPRSSSGLSKPRFSKVRRQVKSQNLKPSGTSDSLPGQSFNPFHFRGSFSGDPTPSEIGFGRSSNEGFVFGGSSHVDKLQSDEKIGIRVMEEMERLKIESEGKASRLPEDMQNLNSSFSFGVKKGSNNSVFATVELPTLLSNKLIIDSSSRSTGHVIQESMEKLNISERGTDQKQNNNVKSKVSMDYVGEKILSDDLSRKLSVGSMTTDGNHSGDSFQGSVNEKKVHDFNSSCPMNYSFVGTEPSQNLNARNVHDVSSTVNTSDFNFVSNQDSVKTGFMEFKTPNSKVNPFSSLDQKLGFNAKKDSVGATTRARRKGGKQPVKVQLNIGREFAFAESAIPNGSNEAPEAYSPMDISPYEETEVCREFSADIPPTAPNYLFDAELVAATERMEINEGDEVNNYQAEEFNTGNCADHEDLAGDSISGAETESFKSAAEEMETSSETFATASESEVTSRYKSDRKENDDHSLSNTDAASSSFTFSASSFSGVQGPLSTSKRINRKKNPIKLGQDPYILIPNATLPLKSSQHSPLTGVQSHFSTGKPSERDPLTRLHKPINNSVMEKARIEKDVSNAAQEACEKWRLRGNNAYKIGDLSRAEESYTQGIDSVPRIETSRNCLRALMLCYSNRAATRMALGRMREAIADCTMASSIDSNFLKVQVRAANCYLSLGEIEDASRYFKKCLQSGSDICVDRKIIVEASEGLQKAQRVSECMHEAGRRLQLRTLTDAEKALEILEDSLLISTYSEKLLTMKGEALLMLEKYDAAIKLCEQTVDLAGKNSPPDSHDTPKDINFRIWQCHLMLKSSFYMGKLEEAIASLEKQEQLLSATKREGNKTLESSIPLAATIRELLRLKVLPSSSMSIALNLHLLFRIQLPAAGNEAFQSGRHTEAVEHYTAALACNVESRPFTAVCFCNRAAAYKALGQFSDAIADCSLAIALDQNYSKAISRRATLFEMIRDYGQAASDMERYVNILTKQMEEKTSGTLDRSTSMSNDIRQARIRLSELEEKSRKENSLDMYLVLGVVPSCSASDIRKAYRKAALKHHPDKAGQSLTRNETKDERLWKEIGEEVRKDTDKLFKMIGEAYAVLSDPAKRSQYDLEEEMHNSQKRRDGSSTSGADTDNYPFHSSRRNWREGWSSRKDPSTPRWFDPNRSNRYP

SEQ ID NO: 1203 - protein, 149 aa, Oryza sativa; identical to SEQ ID NO: 710

SEQ ID NO: 1204 - protein, 598 aa, Aeropyrum pernix
MLAVKGSIVRISGPLVVAEGMSGAQMYEMVYVGEDRLIGEITRIRGDRAFIQVYESTSGLKPGEPVVGTGAPLSVELGPGLLGTIYDGVQRPLPIIAEKVAEVDPRRRMFVERGIQAPPLPRDRKFHFKPEPLKEGDKVEGGDALGRVPETSLIEHVVMVPPGIRGRLKWLASEGDYSVEDTIAVVERDGRDVEIRMHQRWPVRIPRPFKEKLEPQLPLITGVRIIDTFFPMAKGGTGAVPGGFGTGKTVTLHSLAQWSEARVVIYIGCGERGNEMTEVLERFPQYKDPWTGKPLMDRTVLIANTSNMPVAAREASIYVGITIAEYYRDMGYDVLLVADSTSRWAEALREIAGRLEEMPAEEGYPSYLASRLAEFYERAGRVKALGSPERSGSVTVVGAVSPPGGDFSEPVTSHTTRFIRVFWALDTKLAYSRHYPAINWLMSYSAYVDLVTQWWHENVDKRWREYRDEAMDILLRESELQEIVRLVGTEGLDEKDKMVLETARLIKDGFLKQNAFDPIDAFATPQKQFRLLKMIMDIHRKSLELIEKGVTTQQILQALGRLYIDIVKAKFTIPNDQLEKIDEIRDRALKALDELVSG

SEQ ID NO: 1205 - protein, 337 aa, Acrosiphonia duriuscula
MPRNRDDSPDGAYLIHGRYEKIEKLGEGTYGKVYKARDSKTDQVVALKKCRLQLDAEGVPPTTIREVSLLQVLSRSNHVVKLLGVEQIEEDGKVVLYLIFEYLQHDLKKFMDFKKKEKHNPLQPELVKPYLFQLIRGMAFMHQHGVMHRDLKPQNLLVDPKTNVLKIADLGLGRVFALPCKAYTHEIVTLWYRAPEVLLGTKIYSLPVDVWSIGCIFAEMVKGIPFFPADCEIAQLFMIFQVLGTPNEEVWPGVTSLRDWHMYPQWQPMDLHTHLEGLLDHQGCDLLKKMLVYNPNKRIPAKQAMKHPYFDDLDMEVMDALENPEVLNAGMEYQENA

SEQ ID NO: 1206 - protein, 462 aa, Escherichia coli
MKKTKIVCTIGPKTESEEMLAKMLDAGMNVMRLNFSHGDYAEHGQRIQNLRNVMSKTGKTAAILLDTKGPEIRTMKLEGGNDVSLKAGQTFTFTTDKSVIGNSEMVAVTYEGFTTDLSVGNTVLVDDGLIGMEVTAIEGNKVICKVLNNGDLGENKGVNLPGVSIALPALAEKDKQDLIFGCEQGVDFVAASFIRKRSDVIEIREHLKAHGGENIHIISKIENQEGLNNFDEILEASDGIMVARGDLGVEIPVEEVIFAQKMMIEKCIRARKVVITATQMLDSMIKNPRPTRAEAGDVANAILDGTDAVMLSGESAKGKYPLEAVSIMATICERTDRVMNSRLEFNNDNRKLRITEAVCRGAVETAEKLDAPLIVVATQGGKSARAVRKYFPDATILALTTNEKTAHQLVLSKGVVPQLVKEITSTDDFYRLGKELALQSGLAHKGDVVVYGFWCTGTERHY

SEQ ID NO: 1207 - protein, 134 aa, Sorghum bicolor
MAAKMFALFALLALCASATSATHIPGHLPLVMPLGTMNPCTQYCMMQQRFARLLAWPIPMLQQLSLQPAYQTPMTMPNMMPPMTMMPSMMSLPQCHCDAISQIMQQQQLPFMFNPTAMAIPPMFLQQPFVSSAF

SEQ ID NO: 1208 - protein, 578 aa, Methanosarcina barkeri
MEVKGEIYRVSGPVVTAIGLQAKMYDLVKVGNEGLMGEVIQILGPKTIIQVYEETAGIKPGEPCVSTGSSLSVELGPGLLSSIYDGVQRPLHVLLEKMGSFIQRGVSADGLDHKKLWDFKPIVKKGDSVKGGDVIGVVQETVNIEHKIMVPPDISGTISDIKSGNFTVVDTICTLTDGTELQMMQRWPVRRPRPVKAKLTPTRPLVTGMRILDGLFPVAKGGTAAIPGPFGSGKTVTQQSLAKWSDTEIVVYIGCGERGNEMADVLSEFPELEDPQTGRPLMERTVLIANTSNMPVAAREASVYTGITIAEYYRDMGLDVSLMADSTSRWAEAMREISSRLEEMPGEEGYPAYLSARLAEFYERAGVAESLCGETGSITVIGAVSPPGGDFSEPVTQNTLRIVKVFWALDAKLSQRRHFPAINWLNSYSLYKDSLNDWFADNVAPDYVPLRERAMEMLQTESELQEIVQLVGSDALPDDQQLLLEITRMLREIFLQQNAFHPVDAYSPFDQQYKILKAIMKWGDAAMDALKSGVPVTEIIKLESKNVLAKVKYEEKFDESMNAVLAQMDKEFASLRGR

SEQ ID NO: 1209 - protein, 414 aa, Clostridium acetobutylicum
MRRVVITGYGVISSSGNDVDTFWSNIVNGISGIREITDPSFSNIASRIAGYINDFNPYEYFDKREIRHYDLYTQYAFAAAKQAIDNANVKEGNFDTSRVGIYVGSGIGGISTVLNSHKAYLEKGTRHVSPFMIPMMISNMASGVIAIKTGFKGPSFSPVSACATANQAIGEAFLSIRHGYTDAIIAGGSEAPINTLAFSGFANMKAMSTNNANPTEASRPFDKLRDGFVMSEGAGILFLEELTHAKRRGAKILGEIIGYGSTTDAYHITSPDYHGAARAMEMALEMADISASQIDYINAHATGTKGGDKSETNAIKAVFKENVKKLKISATKSMTGHLFGAAGGIEAIITLKALEYGIIPPTINLKNVDEECDLDYVPNKAIKHDSNFAISNGFGFGGHNASLLFKKWNPAMEY

SEQ ID NO: 1210 - protein, 120 aa, Euphorbia tirucalli
ENDGVVGHVSKYSCHLWENILKGNSLHRAFSVFLFNSKYELLLQQRSATKVTFPLVWTNTCCSHPLYRESELIEEDYLGVRNAAQRKLLDELGIPAEDVPVDQFTPLGRILYKAPSDGKW

SEQ ID NO: 1211 - protein, 430 aa, Clostridium acetobutylicum
MKKNYVKDVFHMSEGEEITLQGWIHKIYDLGHVNFVRLRDKTGIVQLVAQKEQLAGLRNETCIKVKGVLSKNDKAIDGMEVQVKEIEVLGKVYYDKLPFDINGKKINAALETQLDHRNVSLKKPSVMAVFKIQEEIGECFRKFLKLNNFTEVHTPKILASGTEGGSELFTVNYFDHRAFLAQSPQFYKQMMVGVGFEKVFEVGHAYRAELHNTYRHLNEYVSLDAEMGFIEDENEIMDLEEGFINYLFENLRETCARELKMYNITLPEKVSIPRIPLSEAQQIVFDKYGKRSPKGDLNAEGERLFSKYVKEKYDSDFVYLTKYPLSKRPMYTMPDDEIEGASKSFDLIYKGLEITTGGQRIHDHDMLVEAIKNKGFKAEEFEFYTENFRYGMPPHGGFAIGLERLTMQILGLENIREASLLPRDMKRITP

SEQ ID NO: 1212 - protein, 123 aa, Clostridium acetobutylicum
MTREEIIEAIKGMSVLELNELVKACEEEFGVSAAAPVAVAGAAGAAGAAAGEEKTEFDVVLAEAGAKKLQVIKVVRELTGLGLKDAKALVDGAPKTIKEGVAKEEAESMKAKIEEAGGKVELK

SEQ ID NO: 1213 - protein, 694 aa, Oryza sativa
MSGAIASSPAATLFLAGSSSSSPRRRRSRVSGVWWHLYGGTGLRLHWERRGLVRDGAVVCSASAAGGEDGVAKAKTKSAGSSKAVAVQGSTAKADHVEDSVSSPKYVKPAVAKQNGEVVSRATKSDAPVSKPKVDPSVPASKAEADGNAQAVESKAALDKKEDVGVAEPLEAKADAGGDAGAVSSADDSENKESGPLAGPNVMNVIVVASECSPFCKTGGLGDVVGALPKALARRGHRVMVVIPRYGEYAEAKDLGVRKRYRVAGQDSEVSYFHAFIDGVDFVFLEAPPFRHRHNDIYGGERFDVLKRMILFCKAAVEVPWFAPCGGSIYGDGNLVFIANDWHTALLPVCLKAYYRDNGLMQYTRSVLVIHNIAHQGRGPVDDFATMDLPEHYIDHFRLYDPVGGEHSNVFAAGLKMADRAVTVSHGYLWEIKTMDGGWGLHEIINHNDWKLQGIVNGIDMAEWNPEVDEHLQSDGYANYTFETLDTGKKQCKEALQRQLGLQVRDDVPLIGFIGRLDHQKGVDIIGDAMPWIAGQDVQVVMLGTGRPDLEEMLRRFESEHNDKVRGWVGFSVQLAHRITAGADVLLMPSRFEPCGLNQLYAMAYSTVPVVHAVGGLRDTVAPFDPFADTGLGWTFDRAEANRMIDALGHCLNTYRNYKESWRGLQARGMAQDLSWDHAAELYEDVLVKAKYQW

SEQ ID NO: 1214 - protein, 421 aa, Sinorhizobium meliloti
MRRVVITGTGMVSPLGCGTEVSWARLLTGDNAARKVTEFEVEDLPAKIACRIPFGDGSDGTFNADDWMEPKEQRKVDPFIVYAMAAADMALADAGWKPESDEDQISTGVLIGSGIGGLEGIVDAGYTLRDKGPRRISPFFIPGRLINLAAGQVSIRHKLRGPNHSVVTACSTGAHAIGDASRLIALGDADVMVAGGTESPICRISLAGFAACKALSTQHNDNPEKASRPYDADRDGFVMGEGAGIVVLEELEHARARGAKIYAEVIGYGLSGDAFHITAPSEDGEGAYRCMQMALKRAGVTAADIDYINAHGTSTMADTIELGAVERLVGDSASRISMSSTKSAIGHLLGAAGAVEAIFSALAIRDNIAPPTLNLDNPSVETKIDLVPHVARKREINVALSNSFGFGGTNASLILRRYTGH

SEQ ID NO: 1215 - protein, 126 aa, Sinorhizobium meliloti
MADLAKIVEDLSSLTVLEAAELSKLLEEKWGVSAAAPVAVAAAGGAAGAAAPVEEEKTEFDVILTDAGANKINVIKEVRAITGLGLKEAKDLVEGAPKAVKEAVSKAEAADLKKKLEDAGAKVDVK

SEQ ID NO: 1216 - protein, 479 aa, Sinorhizobium meliloti
MRRNRKVKILATLGPASADEQMIQKLHEAGADLFRINMSHASHEVMRTLIERIRVVEARCGRPIGILADLQGPKLRVGKFAEGKVELKIGQTFTLDNRDVPGDSRRVYLPHPEILEAVKPGHRLLIDDGKLHLRAEKTDGKSIVTTVVSGTRISDRKGVSLPDTLLGVGALTDKDRVDLDAVLATGEVDWVALSFIQRPEDLAEVRKIARGRVGLMSKIEKPQAIERIDEIIELSDALMVARGDLGVEMPLESVPGLQKQLTRACRRAGKPVVVATQMLESMISSPVPTRAEVSDVATAVFEGADAVMLSAESASGEYPVEAVSTMASIASNVERDPHYPGIIYAQRTPPEATGADAISLAAHQIAETLKLAAIVTYTSSGTTGLRAARERPQVPVIALSPIVQTARRLSVVWGLHCVVTEDATDLDDMVNRACRIVSTEGFGKPGDRIIVTAGVPLGTPGATNMLRIAYIGSDGQSGI

SEQ ID NO: 1217 - protein, 179 aa, Apium graveolens
KASKSPEMLEPLSRGVAQGVSEKRFRQATAEPAYPWTNDMLSQQRTSFHFQPQENWMNDPNGPLFHMGWYHLFYQYNPDSAIWGNITWGHAISTDLINWLHLPFAMQPDQWYDINGVWTGSATILPDGKIVMLYTGDTDDLVQVQNLAYPANLSDPLLLDWIKYPDNPVMFPPPGIGST

SEQ ID NO: 1218 - protein, 545 aa, Solanum tuberosum
MTLTLQSSASFINFKETKGVKAPDEFLGMVSFAQAKPSCRLVAKSSMQEAQLSHERIMEVKKIEKREKLHELPANHSNRSTRVPVFVMLPLDTMTMGGNLNRPRAMNASLMALKSSGAEGVMVDAWWGLVEKDGPLKYNWEGYAELVKMCQEHGLKLQVVMSFHQCGGNVGDSCSIPLPPWVLEEISKNPDLVYTDRSGRRNPEYLSLGCDMLPVLKGRTPIQVYTDYMRSFRERFNEYLGNVIVEIQVGMGPCGELRYPAYPESNGTWRFPGIGEFQCYDKYMGASLAAVAKAAGKDDWGQGGPHDSGKYNQFPEDTGFFQRDGTWNSEYGQFFLEWYSGKLLEHGDRILAAGESIYQGTGAKLSGKVAGIHWHYNTRSHAAELTSGYYNTRHRDGYLPIARMLAKHGAVLNFTCMEMRDGEQPQSANCSPEGLVRQVKTAARTAEVELAGENALERYDGGAFSQVLATSMSDSGNGLSAFTFLRMNKRLFEPENWRNLVQFVKSMSEGGRNASLPECDSSRTDLYVRFIKESHSKKATEVAVV

SEQ ID NO: 1219 - protein, 762 aa, Arabidopsis thaliana
MDVSALLTSAGINIAICVVLVSLYSILRKQPANYCVYFGRLLSDGRVKRHDPRWYERFAPSPSWLVKAWETTEEEMLAAAGLDAVVFIRMVICSIRIFSIVAVVCLAFVLPVNYYGQKMEHKEVHLESLGVFTIENLNPRSRWLWVHCLSLYIISSAACALLYFEYKNIAKKRLAHISGSASKPSHFTVLIRAIPQSPDQSYSETVSKYFTNYYAPSYVSHLMVYRDGFIHRLMNETERMCQAIKHVSPDLSCNPSLKSCVLCGPAATNSFQIISNETDSVKGLELGELTLTTTEEERPVAFVFFKSRYDALVVSEVLQTPNPMLWVADLAPEPHDVHWRNLRIPYRQLWMRRIATLVGAIAFMFVFLFPVTFVQGLTQLPTLSKNFPFLKDLLNRRFMEQVITGYLPSVILVLFFYTVPPLMMYFSTLEGCVSRSQRKKSACLKILYFTIWNVFFVNILSGSVIRQFTVLNSVRDVPAQLAKLVPAQAGFFMTYCFTSGWAGLACEIMQPVGLIWNLIAKVIVKNKEESYETLRFPYHTEIPRLLLFGLLGFTNSVIAPLILPFLLIYFFFAYLIYKNQIINVYITKYESGGQYWPVFHNTTIFSLILSQVIALGFFGLKLSTVASGFTIPLILLTLLFSEYCRQRFAPIFQKYPAEILIAMDRADEMTGKMEEIHNNLKVAYSQIPTCSEESSKAGCTSPCSDQELPDSEELKPEKENLKADYIWEFQRSKSGLDLEVKSCPSASPIRNSPGFAEIYKRT

SEQ ID NO: 1220 - protein, 511 aa, Agrobacterium tumefaciens
MDMDAMTKLDVKQEAAALLDKMGVARDLYTGGDMASFSPVTGEQIASLRTVSVEGVAAVVDKADAAFRTWRNVPAPRRGELIRLLGEELRAFKTDLGRLVSLEAGKIPSEGLGEVQEMIDICDFAVGLSRQLYGLTIATERPGHRMMETWHPLGVVGVISAFNFPVAVWSWNAALALVCGNSVVWKPSEKTPLTALAVQGIFERAAARFGDAPEGLSQLLIGDRAVGEAMVDYPKVPLVSATGSTRMGRDVGPRLAKRFARAILELGGNNAGIVCPSADLDMALRAIAFGAMGTAGQRCTTLRRLFVHDSVYEELVPRLKKAYASVSVGNPLESSALVGPLVDKAAFDGMQKAIEAAKAAGGVVHGGDRVDTGAADAYYVKPALVEMPKQVGPVLEETFAPILYVMKYSDLDQAIDAHNAVAAGLSSSIFTRDIQESERFLSSEGSDCGIANVNIGTSGAEIGGAFGGEKETGGGRESGSDSWKAYMRRATNTINYSKALPLAQGVSFDIE

SEQ ID NO: 1221 - protein, 331 aa, Rhodobacter sphaeroides
MAIELEDLGLSPDVADVMQRLARVGAGIARIISRNGLERDLGAGVGTNAGGDGQKALDVIADDAFRAALEGSAVAYYASEEQDEVVTLGEGSLALAIDPLDGSSNIDVNVSIGTIFSIFPAAAGPEASFLRPGTEQIAGGYIIYGPQCALVCSFGQGVQHWVLDLDAGIFRRMPDIRPLPAETSEFAINASNYRHWPQPIRAFVDDLVAGAEGPRGKNFNMRWIASLVAETHRILMRGGVFLYPGDERKGYERGRLRHVYECAPIAFLIANVGGGATDGCADILTALPDRLHARTPFVFGCASKVARVAAYHDLACEETSALFGSRGLFRS

SEQ ID NO: 1222 - protein, 167 aa, Solanum demissum
MVDPVDRIRKACPKFHFPKRSLVFRVYISVAGCRCSPWSSPYSGLTLVEVTEVSSIIMKRLGMTEQPTVGVMKAGAAELAAAMKGPEAAKEEKKPEKTVFELKLESFESAQKIKIIKEVRSSTDLGLKEAKDLVEKTPAVFKKGVSKEKAEQIIDKMKAVGAKVVME

SEQ ID NO: 1223 - protein, 475 aa, Vicia faba
MTMEEKEEHSTEAAVTSHNDSKLFDDDDRVKRTGTVWTTSSHIITAVVGSGVLSLAWAIAQLGWIIGLSVMIFFSLITWYTSSLLSECYRTGDPHFGKRNYTFMEAVHTILGGFYDTLCGIVQYSNLYGTAVGYTIGASISMMAIKRSNCFHSSGGKDGCRISSNPYMISFGVIQIFFSQIPDFHEMWWLSIVAAIMSFTYSLIGLGLAIAKVAENGSFKGSITGVSIGTVTEAQKVWGVFQSLGNIAFAYSYSQILIEIQDTIKSPPSEMKTMKQATKISIGVTTIFYMLCGGMGYAAFGDLSPGNLLTGFGFYNPYWLIDIANAALIIHLVGAYQVYAQPLFAFVEKIMIKRWPKIKKEYKLTIPGFRPYHLNLFRLIWRTIFVITTTFISMLIPFFNDVLGLIGAAGFWPLTVYFPVEMYIKQKKITKWSYKWISMQTLSVICFVVSVVAFVGSVSSIVVDLKKYKPFTTDY

SEQ ID NO: 1224 - protein, 486 aa, Vicia faba
MVENISRTNLSYRGDTGGIEEAIDDAPLQTDSKFYDDDGRVKRTGTVWTTCSHIITGVIGSGVLSLAWSVAQMGWIAGPATMIFFSIITLYTSSFLADCYRSGDTEFGKRNYTFMDAVHNILGGPSVKICGVVQYLNLFGSAIGYNIAAAMSMMEIRKSYCVHSSHGEDPCHVSGNAYMIAFGVAQLFFSQIPDFHNTWWLSIVAAVMSFFYSTIALALGISKVAETGTVMGSLTGISIGTVTPAQKVWGVFQALGNIAFAYSYSFILLEIQDTIKSPPSEGKAMKKAAKLSIGVTTTFYLLCGCTGYAAFGDAAPGNLLAGFGVSKAYILVDMANAAIVVHLFGAYQVYAQPLFAFVEKEAGKKWPKIDKGFEVKIPGLPVYNQNIFMLVWRTIFVIVPTLIAMLIPFFNDVLGVIGALGFWPLTVYFPVEMYIIQKKIPKWSRKWICLEIMSTFCLFVSVVAGLGSLIGVWIDLKKYKPFSLEN

SEQ ID NO: 1225 - protein, 481 aa, Vicia faba
MVVEKNASNNHHQTFYVSIDQQIDSKFFDDDGRVKRTGTSWTASAHVITAVIGSGVLSLAWAIAQLGWIAGPIVMFLFAWVTYYTSVLLCECYRNGDPVNGKRNYTYMEVVHSNLGGFQVQLCGLIQYLNLVGVAIGYTVASAISMMAIVRSNCFHRSGGKDPCHMNSNIYMIAFGAVQIIFSQIPDFDQLWWLSIVAVVMSFTYSTIGLGLGIGKVIENKKFAGTITGINDVTKAQKTWGSLQALGDIAFAYSFSMILIEIQDTIKAPPPSESKTMKKATLISVIVTTFFYMLCGCFGYAAFGNSSPGNLLTGFGFYNPFWLLDIANAAIVIHLIGAYQVYCQPLFAFVENYTAKRFPDSDFVNKDVKIPIPGLDRYKLNLFRLVWRTVYVILTTLISMLLPFFNDIVGLLGAIGFWPLTVYFPVEMYIIQKKIPKWSTKWICLQLLSGACLIITIAATIGSIAGLILDLKVFKPFKTIY

SEQ ID NO: 1226 - protein, 1558 aa, Arabidopsis thaliana
MAPRSSKGKSNNKGKGGDKKKRDDKLLAPSLVEITVTTPYETQVILKGVSTDKIIDVRRLLASHVETCHFTNYSLSHKVKGHKLNDNIQVLSLKPCFLRMIPEEYLEESQALTQVRRVIDIVACTTRFFSKSPNKSIVAGNANPTPAPDGLDMVAIHTTPKLSQFYEFFSIHHLSPPILHLKKVDGEEAGEKRDGDYFGLKVKICNGKVIHVIASVKGFFAVGKQLSHCHSIVDLLQNVSNAFAKAYESLMKAFTDRNKVADFGNLPFGLRSNTWLVPSPVSESASPLPTEDEHWGGNGGGQGRNGEYDHRPWAAEFSVLATLPCKTEEERVIRDKKAFLLHSQFIDTSVQRAVRAICNVMDTNQQTSGTTDLPAGSILLEDHVGDLSIVVKRDIASLDSKPEATFQNDAFVLSSEELAERNLLKGITADESVIVHTITSEEKNIQDTPALGKVIVRQCGYTAVVNVKGQTQKAMSDFRDILIDDLPDGGANALNLNSLRVEFHRPHSVGTSVENQPTQLDWDDLESYRCIIQELVKINLTKLEETRVSSVRPIRWELGSTWVQHLQKKETDVCGKPATNDETELSVKGLGKQFKDLKSKSKKSENISAVNEKDTRLHELNEEDDLGQKSIDGLFTELKELLSEEAFSRLKETGTGLHLKSKEELTNMAYGYYDEIALPRLVADFGSLELSPVDGRTLTDFMHIRGLQMRSLGHVAKLAEKLPHIQSLCIHEMITRAFKHLLRAVIASVNNMAELPVAVGLELVSRDFDFDSPNPFMSSDIIGLVPVCKHVLCISSDGRTLLESSKLALDKGKLDDAVSYGTKALVKMIAVCGPYHRNTACAYSLLAVVLYHTGDFNQATIYQQKALDINERELGLDHPDTMKSYGDLSVFYYRLQHFELALKYVNRALFLLHFTCGLSHPNTAATYINVAMMEKEVGNDHLALRYLHEALKSNKRLLGADHIQTAASYHAIAVALSFMEAHSLSVQHEQTTLQILTAKLGADDLRTQDAAAWLEYFESRAIEQQEAGRNGIPKPDASIASKGHLSVSDLLDYISSDPDTKGNVAHRKHRRARILQVNDKVASADDDAHRVASQIDIVTWNNVAEADVTKSRSEVNDPDTVVDKTNIETGDIVVHRLNVDRQTVEESTLDEGWQEAYSKGRSGNGAGRKSRQRQPDLMKKRMLLNKHHNRNQDVQQQNIYSPLQKTSKGPSLSKSSPRRALKNAEIDVSTNTTKPQLKASGAAAVTSTTLASKSLSYKEVALAPPGTVLKPMLEKLELNLERTETQIYRTSSASSGEESKSDTVMLDLPIEGTELHCEKQESQESAESVENLTSESEGDLGSYRGKKTSDISRTKLSASAEPYNPGGFLVIDLQSSAATIGSYPIMVADPISWAVVSCGIHSPPYYSAIHSNGVGTPRSMNPDAPEFVPRRSLQNSSQHAGEDASVSVDSSSCLKAEKDAVDLKKRELASFIVKSSQKEVPAALSKTSPEAESGGTSEKDSAVTEIVYSREEENGANANETNGGEGFVIVAKKRRRKNKVRLTNVAAGLYHQPSSVCA

SEQ ID NO: 1227 - protein, 246 aa, Arabidopsis thaliana
MDVSALLTSAGINIAICVVLVSLYSILRKQPANYCVYFGRLLSDGRVKRHDPRWYERFAPSPSWLVKAWETTEEEMLAAAGLDAVVFIRMVICSIRIFSIVAVVCLAFVLPVNYYGQKMEHKEVHLESLGVFTIENLNPRSRWLWVHCLSLYIISSAACALLYFEYKNIAKKRLAHISGSASKPSHFTVLIRAIPQSPDQSYSETVSKYFTNYYAPSYVSHLMVYRDGFIHRLMVCVFIYFCNMLT

SEQ ID NO: 1228 - protein, 1118 aa, Arabidopsis thaliana
MKVFCWNIRGLNSRNRQRVVRSWIASNNLLVGCFLETHVAQENANSVLASTLPGWRMDSNYCCSELGRIWIVWDPSISVLVFKRTDQIMFCSIKIPSLLQSFAVAFVYGRNSELDRRSLWEDILVLSRTSPLSVTPWLLLGDFNQIAAASEHYSINQSLLNLRGMEDLQCCLRDSQLSDLPSRGVFFTWSNHQQDNPILRKLDRALANGEWFAVFPSALAVFDPPGDSDHAPCIILIDNQPPPSKKSFKYFSFLSSHPSYLAALSTAWEENTLVGSHMFSLRQHLKVAKLCCRTLNRLRFSNIQQRTAQSLTRLEDIQVELLTSPSDTLFRREHVARKQWIFFAAALESFFRQKSRIRWLHEGDANTRFFHRAVIAHQATNLIKFLRGDDGFRVENVDQIKGMLIAYYSHLLGIPSENVTPFSVEKIKGLLPFRCDSFLASQLTTIPSEEEITQVLFSMPRNKAPGPDGFPVEFFIEAWAIVKSSVVAAIREFFISGNLPRGFNATAITLIPKVTGADRLTQFRPVACCTTIYKVITRIISRRLKLFIDQAVQANQVGFIKGRLLCENVLLASELVDNFEADGETTRGCLQVDISKAYDNVNWEFLINILKALDLPLVFIHWIWVCISSASYSIAFNGELIGFFQGKKGIRQGDPMSSHLFVLVMDVLSKSLDLGALNGLFNLHPNCLAPIITHLSFADDVLVFSDGAASSIAGILTILDDFRQGSGLGINREKTELLLDGGNFARNRSLADNLGITHGSLPVRYLGVPLMSQKMRRQDYQPLVDRINSRFTSWTARHLSFAGRLQLLNWIWRKLCKLRPFARPFIICEVGSGVTASFWHDNWTDHGPLLHLTGPAGPLLAGLPLNSVVRDALRDDTWRISSSRSRNPVITLLQRVLPSAASLIDCPHDDTYLWKIGHHAPSNRFSTADTWSYLQPSSTSVLWHKAVWFKDHVPKQAFICWVVAHNRLHTRDRLRRWGFSIPPTCVLCNDLDESREHLFFRCQFSSEIWSFFMRALNLNPPPQFMHCLLWTLTASRDRNITLITKLLFHASVYFIWRERNLRIHSNSVRPAHLIIKEIQLIVRARLDPLSRSSRVVSQPGSSLLASWFGVFQRSPVSG

SEQ ID NO: 1229 - protein, 626 aa, Arabidopsis thaliana
MLSVKRCIKILKLWHLLPEITPSLRQNISGYNIFDWKGRVRSRSKKRSSSTPPRLITSQNCVKGKNIEIVPSTVLVEAGQSYAKGSAWVKKSTTGVARSPVKPPESHLPESVLVSAIPSEDSFPYPPGWGAMSSKSRKRWRHKWNISRSSAADHISKVSGSPRALVSGGSSSESNAPAILDSTLPSWRLDTNYCCSELGRIWIVWDPSVSVLVFKKTDQLMILVGDFDQIAATSDHYSVLQTSIPMRGLEEFQNCLRDSDLVDIPSRGVHYTWSNHQDDNPIIRKLDRAIANGDWFSSFPSAIAVFELSGVSDHSPCIIILENLPKRSKKCFRYFSFLSTHPTFLVSLTVAWEEQIPVGSHMFSLGEHLKAAKKCCKLLNRQGFGNIQHKTKEALDSLESIQSQLLTNPSDSLFRVEHVARKKWNFFAAALESFYRQKSRIKWLQDGDANTRFFHKVILANQAKNLIKFLRMDDDVRVENVTQVKEMIVAYYTHLLGSDSDILTPDSVQRIKDIHPFRCNDTLASRLSALPSDKEITAAVFAMPRNKAPGPDSFTAEFFWESWFVVKDSTIAAVKEFFRTGHLLKRFNATAITLIPKVTGVDQLSMFRPVSCCTVVYKIITDNTRF

SEQ ID NO: 1230 - protein, 732 aa, Arabidopsis thaliana
MKVQEGLFVVAVFYLAYTQLVKGQPRKECQTRCGNVAVEYPFGTSPGCYYPGDESFNLTCNEQEKLFFGNMPVINMSLSGQLRVRLVRSRVCYDSQGKQTDYIAQRTTLGNFTLSELNRFTVVGCNSYAFLRTSGVEKYSTGCISICDSATTKNGSCSGEGCCQIPVPRGYSFVRVKPHSFHNHPTVHLFNPCTYAFLVEDGMFDFHALEDLNNLRNVTTFPVVLDWSIGDKTCKQVEYRGVCGGNSTCFDSTGGTGYNCKCLEGFEGNPYLPNGCQDINECISSRHNCSEHSTCENTKGSFNCNCPSGYRKDSLNSCTRKVRPEYFRWTQIFLGTTIGFSVIMLGISCLQQKIKHRKNTELRQKFFEQNGGGMLIQRVSGAGPSNVDVKIFTEKGMKEATNGYHESRILGQGGQGTVYKGILPDNSIVAIKKARLGNRSQVEQFINEVLVLSQINHRNVVKVLGCCLETEVPLLVYEFINSGTLFDHLHGSLYDSSLTWEHRLRIATEVAGSLAYLHSSASIPIIHRDIKTANILLDKNLTAKVADFGASRLIPMDKEQLTTIVQGTLGYLDPEYYNTGLLNEKSDVYSFGVVLMELLSGQKALCFERPHCPKNLVSCFASATKNNRFHEIIDGQVMNEDNQREIQEAARIAAECTRLMGEERPRMKEVAAELEALRVKTTKYKWSDQYRETGEIEHLLGVQILSAQGETSSSIGYDSIRNVTTLDIEAGR

SEQ ID NO: 1231 - protein, 460 aa, Arabidopsis thaliana
MSNILQNRRSSFSSSTKSSLAKRQAPSSSENSVKLMPAMTKKRAPLSNITNQKIASRLQNSDSVHCSNKSAKLKIAPSVCVNASFSSNLQQSIVPHKVASSPSKSDDGSVSMDETRSSSDSYKSPQVEYIENDDVSAVVSIERKALSNLFITPNSETIDNYCSRDVLSDMKKMDKNQIVNIDSNNGDPQLCATFACDIYKHLRASEAKKRPDVDYMERVQKDVNSSMRGILVDWLIEVSEEYRLVPETLYLTVNYIDRYLSGNVISRQKLQLLGVACMMIAAKYEEICAPQVEEFCYITDNTYLKDEVLDMESDVLNYLKFEMTAPTTKCFLRRFVRAAHGVHEAPLMQLECMANYIAELSLLEYTMLSHSPSLVAASAIFLAKYILDPTRRPWNSTLQHYTQYKAMELRGCVKDLQRLCSTAHGSTLPAVREKYSQHKYKFVAKKFCPSVIPQEFFNNS

SEQ ID NO: 1232 - protein, 1108 aa, Arabidopsis thaliana
MVRHSRRESFFDMVGFEVCPDTDLLWPFGKLDGLDRDEIRETAYEIFFAACRSSPGFGGRNALTFYSKHNAGDHQGDGIGGGGGSGSSNGSGFGSLGRKEVLTTPTSRVKRALGLKMLKRSPSRRMSTVGTVVGAVSAPSSPGNNGSIGSGSGHFSPGAGFFTVPPARPRRPLTSAEIMRQQMKVTEQSDTRLRKTLMRTLVGQTGRRAETIILPLELLRHVKPSEFGDVHEYQIWQRRQLKVLEAGLLIHPSIPLEKTNNFAMRLREIIRQSETKAIDTSKNSDIMPTLCNLVASLSWRNATPTTDICHWADGYPLNIHLYVALLQSIFDIRDETLVLDEIDELLELMKKTWIMLGITRAIHNLCFTWVLFHQYIVTSQMEPDLLGASHAMLAEVANDAKKSDREALYVKLLTSTLASMQGWTEKRLLSYHDYFQRGNVGLIENLLPLALSSSKILGEDVTISQMNGLEKGDVKLVDSSGDRVDYYIRASIKNAFSKVIENMKAEIEETEEGEEEAATMLLRLAKETEDLALRESECFSPILKRWHLVAAGVASVSLHQCYGSILMQYLAGRSTITKETVEVLQTAGKLEKVLVQMVAENSDECEDGGKGLVREMVPYEVDSIILRLLRQWIEEKLQTVQECLSRAKEAETWNPKSKSEPYAQSAGELMKLANDAIEEFFEIPIGITEDLVHDLAEGLEKLFQEYTTFVASCGSKQSYIPTLPPLTRCNRDSKFVKLWKKATPCAASGEELNQMGEAPGGNHPRPSTSRGTQRLYIRLNTLHFLSSQLHSLNKSLSLNPRVLPATRKRCRERTKSSSYFEFTQAGIESACQHVSEVAAYRLIFLDSYSVFYESLYPGDVANGRIKPALRILKQNLTLMTAILADKAQALAMKEVMKASFEVVLTVLLAGGHSRVFCRTDHDLIEEDFESLKKVYCTCGEGLIPEEVVDREAETVEGVIQLMGQPTEQLMEDFSIVTCESSGMGLVGTGQKLPMPPTTGRWNRSDPNTILRVLCYRDDRVANQFLKKSFQLGRICPFTGKKANRANKVSFSNHKTKKLQFVNLQYKRVWWEAGKRFVILRLSTKALKTIEKNGLEAVSKKAGIDLRKK

SEQ ID NO: 1233 - protein, 861 aa, Arabidopsis thaliana
MAKSSADDEELRRACEAAIEGTKQSIVMSIRVAKSRGVWGKSGKLGRQMAKPRVLALSVKSKGPRKKAFLRVMKYSSGGVLEPAKMYKLKHLSKVEVITNDPSGCTFTLGFDNLRSQSVAPPQWTMRNTDDRNRLLVCILNICKDVLGRLPKVVGIDIVEMALWAKDNTPVVTTQRSTEDGEPVAESVTESDLKVTVEKELVSQAEEEDMEALLGTYVMGIGEAEAFSERLKRELQALEAANVHAILESEPLVDEVLNGLEAATNIVDDMDEWLGIFNIKLRHMREDIESIETRNNKLEMQSVNNKALIEELDKVIERLRVPSEYAASLTGGSFDEADMLQNIEACEWLAKALRGLEVPNLDPIYANMRAVKEKRAELEKLKATFVRRASEFLRNYFASLVDFMVSDKSYFSQRGQLKRPDHADLRYKCRTYARLLQHLKGLDKNCLGPLRKAYCSSLNLLLRREAREFANELRASTKVSRNPTVWLEGSTGSSQNANTDTSAVSDAYAKMLTIFIPLLVDESSFFAHFMCFEVPALAPPGGAGNDKKSQSNNDDGNDDDDLGIMDIDETDKKPGKNSPDLTALNESLQDLLDGIQEDFYAVVDWAYKIDPLRCISMHGITERYLSGQKADAAGFVRLLLGDLESRVSMQFSRFVDEACHQIERNERNVRQMGVLPYIPRFAALATRMEQYIQGQSRDLVDQAYTKFVSIMFVTLEKIAQQDPKYADILLLENYAAFQNSLYDLANVVPTLAKFYHQASEAYEQAYTIPAWFIESRTPEDVKIKPVRGTQMFIKSVDKSIAAMYKKLQKNLASEELLPSLWDKCKKEFLDKYESFVQLVAKVYPSENVPGVTEMRGLLASM

SEQ ID NO: 1234 - protein, 1564 aa, Arabidopsis thaliana
MAKSSADDEELRRACEAAIEGTKQSIVMSIRVAKSRGVWGKSGKLGRQMAKPRVLALSVKSKGPRKKAILRVMKYSSGGVLEPAKMYDLKHLSKVEVITSDPSGCTFTLGFDNLRSQSVAPPQWTMRNTDDRNRLLVCILNICKDVLGRLPKVVGIDIVEMALWAKDNTPVVTTQRSTEDGEPVAESVTESALKVTVEKELVSQAEEEDMEALLGTYVIGIGEAEAFSERLKRELQALEAANVHAILESEPLVDEVLNGLEAATNIVDDMDEWLGIFNIKLRHMREDIESIEIRNNKLEMQSVNNKALIEELDKVIERLRVPSEYAASLTGGSFDEADMLQNIEACEWLAKALRGLEVPNLDPIYANMRAVKEKRAELEKLKATFVRRASEFLRDYFASLVDFKFSDKSYFSQLKRPDHADLRYKCRTYARLMQHLKGLNKNCLGPLRKAYCSSLNLLLRREAREFAKELRASTKVSRNPTVWLEGSTGSSQNANTDTSAVSDAYAKMLTIFIPLLVDEVPALAPPGGAGNDKKSQSNNDDGNDNDDLGIMDIDEADKKPGKNSPDLTALNESLQDLLDGIQEDFYAVVDWAYKIDPLRSISMHGITERYLSGQKADAAGFVRLLLGDLESRISMQFSHVSILFVTLEKIAQQDPKYADILLLENYAAFQTCLFDLANVVPTLAKFYDQAMEAYEQACTRHISMIIYYQFERLFLFDKKIKDLMYTITPEEIPFQLGLSKVELRKMLKSSLSGVDKSIAAMYKKLQKNLASEELLPSLWDKCKKEFLDKYESFVQLVAKVYPSENVPGVTEMRGLLASIETRGRMRLEVEERLLFFSLKFLGFEYYDSSSVKNIVLTRYQSEDDSRSSTMETRAQARKEKEVMEDPLGLRMEKLENKIAEQNQKLDKSFAQLIDTIRLISVKVNNASSSGHLQQQRSRETVYPSSEVFHVRRTGTNSNYSAVTRSSKLDFHRFSGDRVRDWLFKLEQFFSLDFTPEELKVSIASTLCDGAAAKWYKSLFESDFGVKLLSNWNMYKLLLEEHFAEVLDDPISELKQLKETNGIEEYHKKFELLRARVNLSEDYLVRVYLDGLHPDTQMNVNMFQPQTVCQCLLVGRLYEQVHQKILIIRKVGEDSEKGAPTLNVPNEVAGPSLSNIHVHDALHKDRECFEGKHSIQGTTAGMENFMQQEELNCDRDCVFERDHWCAPYVNLETKLVNQEKSELCTGNEGEVKGCLEVSRQKVSSTFADLDKDDATTSQLRSPFGFVVDDLPSGCGSDNIRFRNSASPLVVGDSQKTPWILNEESNDIQNFQIAIDGSSNFYAGQESNGMRLRSHILTQQKRPSKSPKSWKFKFKISNDSKLRYIKFWCEKKRLMTLQFMGKIAVDMATYEDVYVSSFKKSHRCRKRAMIIVVDLSFDLGVTDGYIGELAFGQVNYFDREEFVKKLQAELDISVREEINQSWYLRISRKEAEEKCYTYLQWAKRSSGTKRAKDFHGRANGDDEECLWAEDWCFKYKTEMEMKGKLWGDKKFQKRLICHFRQPTEYSFSQPWGHGCLGGKDLIWEEE

SEQ ID NO: 1235 - protein, 511 aa, Arabidopsis thaliana
MAFTSMVSTVPVLFFFFTLLLISANSSSLSHNIKVQEQDKDPFVGFNIGTDVSNLLSPTELVKFLQAQKVNHVRLYDADPELLKALAKTKVRVIISVPNNQLLAIGSSNSTAASWIGRNVVAYYPETLITAISVGDEVLTTVPSSAPLLLPAIESLYNALVASNLHTQIKVSTPHAASIMLDTFPPSQAYFNQTWHSIMVPLLQFLSKTGSPLMMNLYPYYVYMQNKGVVPLDNCLFEPLTPSKEMVDPNTLLHYTNVLDAMVDAAYVSMKNLNVSDVAVLVTESGWPSKGDSKEPYATIDNADTYNSNLIKHVFDRTGTPLHPEMTSSVYIYELFNEDLRAPPVSEASWGLFYGNSTPVYLLHVSGSGTFLANDTTNQTYCIAMDGVDAKTLQAALDWACGPGRSNCSEIQPGESCYQPNNVKGHASFAFNSYYQKEGRASGSCDFKGVAMITTTDPSHGSCIFPGSKKVGNRTQTVVNSTEVAAGEATSRSLSRGFCVTIMILVTFSIL

SEQ ID NO: 1236 - protein, 1018 aa, Arabidopsis thaliana
MDEDSSMVADNDQDREFQSLDGGQSPSPMERETPQQMNDQSPPPEGGSVPTPPPSDPNPATSQQQAAAVVGQEQQPALVVGPRCAPTYSVVDAMMDKKEDGPGPRCGHTLTAVPAVGDEGTPGYIGPRLVLFGGATALEGNSGGTGTPTSAGSAGIRLAGATADVHCYDVLSNKWTRLTPFGEPPTPRAAHVATAVGTMVVIQGGIGPAGLSAEDLHVLDLTQQRPRWHRVVVQGPGPGPRYGHVMALVGQRYLMAIGGNDGKRPLADVWALDTAAKPYEWRKLEPEGEGPPPCMYATASARSDGLLLLCGGRDANSVPLASAYGLAKHRDGRWEWAIAPGVSPSSRYQHAAVFVNARLHVSGGALGGGRMVEDSSSVAVLDTAAGVWCDTKSVVTSPRTGRYSADAAGGDASVELTRRCRHAAAAVGDLIFIYGGLRGGVLLDDLLVAEDLAAAETTYAASHAAAAAATNSPPGRLPGRYGFSDERNRELSESAADGAVVLGSPVAPPVNGDMHTDISPENALLPGTRRTNKGVEYLVEASAAEAEAISATLAAAKARQVNGEVELPDRDCGAEATPSGKPTFSLIKPDSMGSMSVTPAGIRLHHRAVVVAAETGGALGGMVRQLSIDQFENEGRRVSYGTPESATAARKLLDRQMSINSVPKKVIAHLLKPRGWKPPVRRQFFLDCNEIADLCDSAERIFASEPTVLQLKAPIKIFGDLHGQFGDLMRLFDEYGSPSTAGDISYIDYLFLGDYVDRGQHSLETISLLLALKVEYQHNVHLIRGNHEAADINALFGFRIECIERMGERDGIWVWHRINRLFNWLPLAASIEKKIICMHGGIGRSINHVEQIENIQRPITMEAGSIVLMDLLWSDPTENDSVEGLRPNARGPGLVTFGPDRVMEFCNNNDLQLIVRAHECVMDGFERFAQGHLITLFSATNYCGTANNAGAILVLGRDLVVVPKLIHPLPPALSSPETSPERHIEDTWMQELNANRPATPTRGRPQNSNDRGGSLAWM

SEQ ID NO: 1237 - protein, 1045 aa, Arabidopsis thaliana
MVRAQNRTRPTTHPDDARALNSIFAAWKIRAPREWNISGELCSGVAIDASVLDSNHAYNPLIKCDCSFQNSTICRINNIKVYAIDVVGPIPPELWTLTYLTNLLTVSCYWEFDSDAVDVKASETLTFGINALSGPIPKEIGLLTDLRLLGISSNNFSGSLPAEIGSCTKLQQMYIDSSGLSGGIPLSFANFVELEVAWIMDVELTGRIPDFIGFWTKLTTLRILGTGLSGPIPSSFSNLIALTELRLGDISNGSSSLDFIKDMKSLSVLVLRNNNLTGTIPSTIGGYTSLQQVDLSFNKLHGPIPASLFNLSRLTHLFLGNNTLNGSLPTLKGQSLSNLDVSYNDLSGSLPSWVSLPDLKLNLVANNFTLEGLDNRVLSGLHCLQKNFPCNRGEGICKCNKKIPSQIMFSMLNVQTYGQGSNVLLEKNCFKTFAIDWCLDYNFSINCGGPEIRSVSGALFEKEDADLGPASFVVSAAKRWAASSVGNFAGSSNNIYIATSLAQFINTMDSELFQSARLSASSLRYYGLGLENGGYTVTLQFAEVQIEGSNSWKGIGRRRFNIYVQGRLVEKDFDIRRTAGGSSVRAVQREYKTNVSENHLEVHLFWAGKGTCCIPIQGAYGPLIAAVSATPDFTPTVANRPPSKGKSRTGTIVGVIVGVGLLSIFAGVVILVIRKRRKPYTDDEEILSMDVKPYTFTYSELKNATQDFDLSNKLGEGGFGAVYKGNLNDGREVAVKQLSIGSRQGKGQFVAEIIAISSVLHRNLVKLYGCCFEGDHRLLVYEYLPNGSLDQALFGDKSLHLDWSTRYEICLGVARGLVYLHEEASVRIIHRDVKASNILLDSELVPKVSDFGLAKLYDDKKTHISTRVAGTIGYLAPEYAMRGHLTEKTDVYAFGVVALELVSGRKNSDENLEEGKKYLLEWAWNLHEKNRDVELIDDELSEYNMEEVKRMIGIALLCTQSSYALRPPMSRVVAMLSGDAEVNDATSKPGYLTDCTFDDTTSSSFSNFQTKDTSFSTSFIAPGPEMPLRDGESKPMVGFKIKEGR

SEQ ID NO: 1238 - protein, 1032 aa, Arabidopsis thaliana
MTRIRRSPCLLLLIIWFMCIAGSVQVVQSQNQTGATTHPDEARALNSIFAAWKIQAPREWNISGELCSGAAIDASVLDSNPAYNPLIKCDCSFQNSTICRITNIKVYAIDVVGPIPPELWTLTYLTNLNLGQNVLTGSLPPAIGNLTRMQWMTFGINALSGPVPKEIGLLTDLRLLGISSNNFSGSIPDEIGRCTKLQQMYIDSSGLSGRIPLSFANLVQLEQAWIADLEVTDQIPDFIGDWTKLTTLRIIGTGLSGPIPSSFSNLTSLTELRLGDISSGSSSLDFIKDMKSLSVLVLRNNNLTGTIPSTIGEHSSLRQVDLSFNKLHGPIPASLFNLSQLTHLFLGNNTLNGSFPTQKTQSLRNVDVSYNDLSGSLPSWVSLPSLKLNLVANNFTLEGLDNRVLPGLNCLQKNFPCNRGKGIYSDFSINCGGPEKRSVTGALFEREDEDFGPASFFVSAGQRWAASSVGLFAGSSNNIYIATSQSQFVNTLDSELFQSARLSASSVRYYGLGLENGGYTVTLQFAEIQILGSTSTTWKGLGRRRFDIYVQGRLVEKDFDVRRTAGDSTVRAVQRVYKANVSENHLEVHLFWAGKGTCCIPIQGAYGPLISAVSATPDFTPTVANKPPSKGKNRTGTIVGVIVGVGLLSILAGVVMFTIRKRRKRYTDDEELLGMDVKPYIFTYSELKSATQDFDPSNKLGEGGFGPVYKGNLNDGRVVAVKLLSVGSRQGKGQFVAEIVAISSVLHRNLVKLYGCCFEGEHRMLVYEYLPNGSLDQALFGDKTLHLDWSTRYEICLGVARGLVYLHEEASVRIVHRDVKASNILLDSRLVPQISDFGLAKLYDDKKTHISTRVAGTIGYLAPEYAMRGHLTEKTDVYAFGVVALELVSGRPNSDENLEEEKKYLLEWAWNLHEKSRDIELIDDKLTDFNMEEAKRMIGIALLCTQTSHALRPPMSRVVAMLSGDVEIGDVTSKPGYVSDWRFDDTTGSSLSGFQIKDTTGYSMSLVAPGSEISPRDSDFKPMLGSKINEGR

SEQ ID NO: 1239 - protein, 337 aa, Arabidopsis thaliana
MARIGSFLILLSLTYALTLCICDNASNFGGNKRNLFPDFYRSSCPRAEEIVRSVVAKAFERETRMAASLMRLHFHDCFVQGCDGSLLLDTSGSIVTEKNSNPNSRSARGFEVVDEIKAALENECPNTVSCADALTLAARDSSVLTGGPSWTVPLGRRDSATASRAKPNKDLPEPDNLFDTIFLRFSNEGLNLTDLVALSGSHTIGFSRCTSFRQRLYNQSGSGSPDTTLEKSYAAILRQRCPRSGGDQNLSELDINSAGRFDNSYFKNLIENMGLLNSDQVLFSSNEQSRELVKKYAEDQEEFFEQFAESMIKMGKISPLTGSSGEIRKKCRKINNS

SEQ ID NO: 1240 - protein, 282 aa, Arabidopsis thaliana
MLYQAASEAAQKRWTTSDFDIGKPLGRGKFGHVYLAREKRSDHIVALKVLFKAQLQQSQVEHQLRREVEIQSHLRHPNILRLYGYFYDQKRVYLILEYAVRGELYKELQKCKYFSERRAATYVASLARALIYCHGKHVIHRDIKPENLLIGAQGELKIADFGWSVHTFNRRRTMCGTLDYLPPEMVESVEHDASVDIWSLGILCYEFLYGVPPFEAREHSETYKRIVQVDLKFPPKPIVSSSAKDLISQMLVKESTQRLALHKLLEHPWIVQNADPSGLYRG

SEQ ID NO: 1241 - protein, 505 aa, Arabidopsis thaliana
MLTNYVPVYVMLQLGVITNDNVLENEESLKKQLKKLKQSQVDGVMVDVWWGIVESKGPKQYQWSAYRNLFAIVQSFGLKLQAIMSFHRCGGNIGDDVNIPIPKWVLEIGDSNPDIFYTNKSGNRNKECLSLSVDNLSLFRGRTAVEMYRDYMKSFRENMEDFISSGVIIDIEVGLGPAGELRYPSYSETQGWVFPGIGEFQCYDKYLRSDYEEEVRRIGHPEWKLPENAGEYNSVPGETEFFEYSNGTYLKEEGNFFLSWYSKKLLLHGDQILDEANKVFLGCKLKIAAKVSGIHWWYKTESHAAELTAGYYNLKNRDGYRAIAKIMRRHHAILNFTCLEMKNTEQPAKAKSGPQELVQQVLSSGWREGIEVAGENALPRFDRNGYNQIILNARPNGVNQDGKPRMFGFTYLRLSDKLLNEPNFSTFKMFLKRMHANQEYCSEPERYNHELLPLERSRNDESLEMFMEETEPFDPFPWLDETDMSIRPFESVLSLLRSTFLRKKS

SEQ ID NO: 1242 - protein, 1009 aa, Arabidopsis thaliana
MRLFLLLAFNALMQLEAYGFTDESDRQALLEIKSQVSESKRDALSAWNNSFPLCSWKWVRCGRKHKRVTRLDLGGLQLGGVISPSIGNLSFLIYLDLSNNSFGGTIPQEMGNLFRLKYLAVGFNYLEGEIPASLSNCSRLLYLDLFSNNLGDGVPSELGSLRKLLYLYLGLNDLKGKFPVFIRNLTSLIVLNLGYNHLEGEIPDDIAMLSQMVSLTLTMNNFSGVFPPAFYNLSSLENLYLLGNGFSGNLKPDFGNLLPNIHELSLHGNFLTGAIPTTLANISTLEMFGIGKNRMTGSISPNFGKLENLHYLELANNSLGSYSFGDLAFLDALTNCSHLHGLSVSYNRLGGALPTSIVNMSTELTVLNLKGNLIYGSIPHDIGNLIGLQSLLLADNLLTGPLPTSLGNLVGLGELILFSNRFSGEIPSFIGNLTQLVKLYLSNNSFEGIVPPSLGDCSHMLDLQIGYNKLNGTIPKEIMQIPTLVHLNMESNSLSGSLPNDIGRLQNLVELLLGNNNLSGHLPQTLGKCLSMEVIYLQENHFDGTIPDIKGLMGVKNVDLSNNNLSGSISEYFENFSKLEYLNLSDNNFEGRVPTEGIFQNATLVSVFGNKNLCGSIKELKLKPCIAQAPPVETRHPSLLKKVAIGVSVGIALLLLLFIVSLSWFKKRKNNQKINNSAPFTLEIFHEKLSYGDLRNATDGFSSSNIVGSGSFGTVFKALLQTENKIVAVKVLNMQRRGAMKSFMAECESLKDIRHRNLVKLLTACASIDFQGNEFRALIYEFMPNGSLDKWLHPEEVEEIHRPSRTLTLLERLNIAIDVASVLDYLHVHCHEPIAHCDLKPSNILLDDDLTAHVSDFGLARLLLKFDQESFFNQLSSAGVRGTIGYAAPEYGMGGQPSIHGDVYSFGVLVLEMFTGKRPTNELFGGNFTLNSYTKAALPERVLDIADKSILHSGLRVGFPVLECLKGILDVGLRCCEESPLNRLATSEAAKELISIRERFFKTRRTARR

SEQ ID NO: 1243 - protein, 321 aa, Arabidopsis thaliana
MGRSPCCDESGLKKGPWTPEEDQKLINHIRKHGHGSWRALPKQAGLNRCGKSCRLRWTNYLRPDIKRGNFTAEEEQTIINLHSLLGNKWSSIAGHLPGRTDNEIKNYWNTHIRKKLIQMGIDPVTHRPRTDHLNVLAALPQLLAAANFNNLLNLNQNIQLDATSVAKAQLLHSMIQVLSNNNTSSSFDIHHTTNNLFGQSSFLENLPNIENPYDQTQGLSHIDDQPLDSFSSPIRVVAYQHDQNFIPPLISTSPDESKETQMMVKNKEIMKYNDHTSNPSSTSTFTQDHQPWCDIIDDEASDSYWKEIIEQTCSEPWPFRE

SEQ ID NO: 1244 - protein, 1088 aa, Arabidopsis thaliana
MSVWNYAVTAQKPTCVTHSCVGNFTSPQELNLIVAKSTRIEIHLLSPQGLQTILDVPLYGRIATMELFRPHGEAQDFLFVATERYKFCVLQWDYESSELITRAMGDVSDRIGRPTDNGQIGIIDPDCRVIGLHLYDGLFKVIPFDNKGQLKEAFNIRLEELQVLDIKFLYGCTKPTIAVLYQDNKDARHVKTYEVSLKDKNFVEGPWSQNNLDNGADLLIPVPSPLCGVLIIGEETIVYCSANAFKAIPIRPSITKAYGRVDLDGSRYLLGDHAGLIHLLVITHEKEKVTGLKIELLGETSIASSISYLDNAVVFVGSSYGDSQLIKLNLQPDAKGSYVEILEKYVNLGPIVDFCVVDLERQGQGQVVTCSGAYKDGSLRIVRNGIGINEQASVELQGIKGMWSLKSSIDEAFDTFLVVSFISETRILAMNIEDELEETEIEGFLSEVQTLFCHDAVYNQLVQVTSNSVRLVSSTTRELRNKWDAPAGFSVNVATANASQVLLATGGGHLVYLEIGDGTLTEVKHVLLEYEVSCLDINPIGDNPNYSQLAAVGMWTDISVRIFVLPDLTLITKEELGGEIIPRSVLLCAFEGISYLLCALGDGHLLNFQLDTSCGKLRDRKKVSLGTRPITLRTFSSKSATHVFAASDRPAVIYSNNKKLLYSNVNLKEVSHMCPFNSAAFPDSLAIAREGELTIGTIDDIQKLHIRTIPIGEHARRICHQEQTRTFAISCLRNEPSAEESESHFVRLLDAQSFEFLSSYPLDAFECGCSILSCSFTDDKNVYYCVGTAYVLPEENEPTKGRILVFIVEEGRLQLITEKETKGAVYSLNAFNGKLLASINQKIQLYKWMLRDDGTRELQSECGHHGHILALYVQTRGDFIAVGDLMKSISLLIYKHEEGAIEERARDYNANWMTAVEILNDDIYLGTDNCFNIFTVKKNNEGATDEERARMEVVGEYHIGEFVNRFRHGSLVMKLPDSDIGQIPTVIFGTVSGMIGVIASLPQEQYAFLEKLQTSLRKVIKGVGGLSHEQWRSFNNEKRTAEAKGYLDGDLIESFLDLSRGKMEEISKGMDVQVEELCKRVEELTRLH

SEQ ID NO: 1245 - protein, 959 aa, Arabidopsis thaliana
MCEPDDNSARNGVTTQPSRSRELLMDVDDLDLDGSWPLDQIPYLSSSNRMISPIFVSSSSEQPCSPLWAFSDGGGNGFHHATSGGDDEKISSVSGVPSFRLAEYPLFLPYSSPSAAENTTEKHNSFQFPSPLMSLVPPENTDNYCVIKERMTQALRYFKESTEQHVLAQVWAPVRKNGRDLLTTLGQPFVLNPNGNGLNQYRMISLTYMFSVDSESDVELGLPGRVFRQKLPEWTPNVQYYSSKEFSRLDHALHYNVRGTLALPVFNPSGQSCIGVVELIMTSEKIHYAPEVDKVCKALEAVNLKSSEILDHQTTQICNESRQNALAEILEVLTVVCETHNLPLAQTWVPCQHGSVLANGGGLKKNCTSFDGSCMGQICMSTTDMACYVVDAHVWGFRDACLEHHLQKGQGVAGRAFLNGGSCFCRDITKFCKTQYPLVHYALMFKLTTCFAISLQSSYTGDDSYILEFFLPSSITDDQEQDLLLGSILVTMKEHFQSLRVASGVDFGEDDDKLSFEIIQALPDKKVHSKIESIRVPFSGFKSNATETMLIPQPVVQSSDPVNEKINVATVNGVVKEKKKTEKKRGKTEKTISLDVLQQYFTGSLKDAAKSLGVCPTTMKRICRQHGISRWPSRKIKKVNRSITKLKRVIESVQGTDGGLDLTSMAVSSIPWTHGQTSAQPLNSPNGSKPPELPNTNNSPNHWSSDHSPNEPNGSPELPPSNGHKRSRTVDESAGTPTSHGSCDGNQLDEPKVPNQDPLFTVGGSPGLLFPPYSRDHDVSAASFAMPNRLLGSIDHFRGMLIEDAGSSKDLRNLCPTAAFDDKFQDTNWMNNDNNSNNNLYAPPKEEAIANVACEPSGSEMRTVTIKASYKDDIIRFRISSGSGIMELKDEVAKRLKVDAGTFDIKYLDDDNEWVLIACDADLQECLEIPRSSRTKIVRLLVHDVTTNLGSSCESTGEL

SEQ ID NO: 1246 - protein, 294 aa, Arabidopsis thaliana
MAIPTETQHQEKEASDASAAAAQKRWTLSDFDIGKPLGRGKFGHVYLAREKRSNHVVALKVLFKSQLQQSQVEHQLRREVEIQSHLRHPNILRLYGYFYDQKRVYLILEYAARGELYKDLQKCKYFSERRAATYVASLARALIYCHGKHVIHRDIKPENLLIGAQGELKIADFGWSVHTFNRRRTMCGTLDYLPPEMVESVEHDASVDIWSLGILCYEFLYGVPPFEAMEHSDTYRRIVQVDLKFPPKPIISASAKDLISQMLVKESSQRLPLHKLLEHPWIVQNADPSGIYRV

SEQ ID NO: 1247 - protein, 222 aa, Arabidopsis thaliana
MATSMIQRMFKQGTKIVCVGRNYAAHAKELGNAVPKEPVIFLKPTSSYLENGGTIEIPHPLDSLHHEVELALVIGQKARDVPESIAMDYIGGYAVALDMTARELQASAKASGLPWTVAKGQDTFTPISSVLPKAMVRDPDNLELWLKVDGETRQKGLTKDMIFKVPYLISYISSIMTLYGDVILTGTPEGVGPVKIGQKITAGITGLSEVQFDVERRVKPLS

SEQ ID NO: 1248 - protein, 324 aa, Arabidopsis thaliana
MANTPLIVSFGEMLIDFVPDTSGVSLAESTGFLKAPGGAPANVACAITKLGGKSAFIGKFGDDEFGHMLVNILKKNGVNSEGVCFDTNARTALAFVTLKKDGEREFMFYRNPSADMLLKESELNKDLIKKAKIFHYGSISLISEPCRTAHMAAMKTAKDAGVLLSYDPNVRLPLWPSTEAAIEGIKSIWNEADIIKVSDDEVTFLTRGDAEKDDVVLSLMHDKLKLLIVTDGEKGCRYYTKKFKGRVPGYAVKAVDTTGAGDSFVGAFLVSLGKDGSILDDEGKLKEALAFANACGAVCTTQKGAIPALPTPADAQKLMKSKSK

SEQ ID NO: 1249 - protein, 1088 aa, Arabidopsis thaliana
MSSWNYVVTAHKPTSVTHSCVGNFTSPQELNLIVAKCTRIEIHLLTPQGLQPMLDVPIYGRIATLELFRPHGEAQDFLFIATERYKFCVLQWDPESSELITRAMGDVSDRIGRPTDNGQIGIIDPDCRLIGLHLYDGLFKVIPFDNKGQLKEAFNIRLEELQVLDIKFLFGCAKPTIAVLYQDNKDARHVKTYEVSLKDKDFVEGPWSQNSLDNGADLLIPVPPPLCGVLIIGEETIVYCSASAFKAIPIRPSITKAYGRVDVDGSRYLLGDHAGMIHLLVITHEKEKVTGLKIELLGETSIASTISYLDNAVVFVGSSYGDSQLVKLNLHPDAKGSYVEVLERYINLGPIVDFCVVDLERQGQGQVVTCSGAFKDGSLRVVRNGIGINEQASVELQGIKGMWSLKSSIDEAFDTFLVVSFISETRILAMNLEDELEETEIEGFLSQVQTLFCHDAVYNQLVQVTSNSVRLVSSTTRELRDEWHAPAGFTVNVATANASQVLLATGGGHLVYLEIGDGKLTEVQHALLEYEVSCLDINPIGDNPNYSQLAAVGMWTDISVRIFSLPELTLITKEQLGGEIIPRSVLLCAFEGISYLLCALGDGHLLNFQMDTTTGQLKDRKKVSLGTQPITLRTFSSKSATHVFAASDRPTVIYSSNKKLLYSNVNLKEVSHMCPFNSAAFPDSLAIAREGELTIGTIDDIQKLHIRTIPLGEHARRICHQEQTRTFGICSLGNQSNSEESEMHFVRLLDDQTFEFMSTYPLDSFEYGCSILSCSFTEDKNVYYCVGTAYVLPEENEPTKGRILVFIVEDGRLQLIAEKETKGAVYSLNAFNGKLLAAINQKIQLYKWMLRDDGTRELQSECGHHGHILALYVQTRGDFIVVGDLMKSISLLLYKHEEGAIEERARDYNANWMSAVEILDDDIYLGAENNFNLLTVKKNSEGATDEERGRLEVVGEYHLGEFVNRFRHGSLVMRLPDSEIGQIPTVIFGTVNGVIGVIASLPQEQYTFLEKLQSSLRKVIKGVGGLSHEQWRSFNNEKRTAEARNFLDGDLIESFLDLSRNKMEDISKSMNVQVEELCKRVEELTRLH

SEQ ID NO: 1250 - protein, 389 aa, Arabidopsis thaliana
MIVYGGGASEDGEGGGVVLKKGPWTVAEDETLAAYVREYGEGNWNSVQKKTWLARCGKSCRLRWANHLRPNLRKGSFTPEEERLIIQLHSQLGNKWARMAAQLPGRTDNEIKNYWNTRLKRFQRQGLPLYPPEYSQNNHQQQMYPQQPSSPLPSQTPASSFTFPLLQPPSLCPKRCYNTAFSPKASYISSPTNFLVSSPTFLHTHSSLSSYQSTNPVYSMKHELSSNQIPYSASLGVYQVSKFSDNGDCNQNLNTGLHTNTCQLLEDLMEEAEALADSFRAPKRRQIMAALEDNNNNNNFFSGGFGHRVSSNSLCSLQGLTPKEDESLQMNTMQDEDITKLLDWGSESEEISNGQSSVITTENNLVLDDHQFAFLFPVDDDTNNLPGIC

SEQ ID NO: 1251 - protein, 325 aa, Arabidopsis thaliana
MGRSPCCDENGLKKGPWTQEEDDKLIDHIQKHGHGSWRALPKQAGLNRCGKSCRLRWTNYLRPDIKRGNFTEEEEQTIINLHSLLGNKWSSIAGNLPGRTDNEIKNYWNTHLRKKLLQMGIDPVTHRPRTDHLNVLAALPQLIAAANFNSLLNLNQNVQLDATTLAKAQLLHTMIQVLSTNNNTTNPSFSSSTMQNSNTNLFGQASYLENQNLFGQSQNFSHILEDENLMVKTQIIDNPLDSFSSPIQPGFQDDHNSLPLLVPASPEESKETQRMIKNKDIVDYHHHDASNPSSSNSTFTQDHHHPWCDTIDDGASDSFWKEIIE

SEQ ID NO: 1252 - protein, 410 aa, Arabidopsis thaliana
MYVVTPPQRSGFGSDCDLRVYQTWKGSNIFCLQGRFIFGPDVRSLGLTISLIVAPVTIFCIFVASKLMDDFSDSWGVSIILVAVVFTIYDLILLMLTSGRDPGIIPRNSHPPEPEVVDGNTGSGTSQTPRLPRVKEVEVNGKVFKVKYCDTCMLYRPPRCSHCSICNNCVERFDHHCPWVGQCIAQRNYRFFFMFVFSTTLLCVYVFAFCCVYIKKIKESEDISILKAMLKTPASIALILYTFISTFFVGGLTCFHLYLISTNQTTYENFRYSYDRHSNPHNKGVVDNFKEIFFSPIPPSKNNFRAMVPRENPMPSRSVVGGFMSPNMGKANDDIEMGRKGVWAMAEHGDGKDGNNNERFHVNDNELNELSPDMGNIVNGDEQINRPNNHPRNANWEMSPEVMALSARRA

SEQ ID NO: 1253 - protein, 162 aa, Arabidopsis thaliana
MVRKQFQQAKTGIEALKSMDANNYLKKVGLGRDDMFFWKQVGKALLCTYTIFGMAWIYNETSPLGWWTLKPRPKEERELAHLYERREFPYPGDTEAMEDFVAKGGMIGTAIGPKGIVESEGEADNYQKEMEKKKFDKEAQKLWLRMRNEVITELQEKGHNLE

SEQ ID NO: 1254 - protein, 336 aa, Arabidopsis thaliana
MAKSLNILIAALSLIAFSPFCLCSKAYGSGGYLFPQFYDQSCPKAQEIVQSIVAKAFEHDPRMPASLLRLHFHDCFVKGCDASILLDSSGTIISEKRSNPNRNSARGFELIEEIKHALEQECPETVSCADILALAARDSTVITGGPSWEVPLGRRDARGASLSGSNNDIPAPNNTFQTILTKFKRQGLDLVDLVSLSGSHTIGNSRCTSFRQRLYNQSGNGKPDMTLSQYYATLLRQRCPRSGGDQTLFFLDFATPFKFDNHYFKNLIMYKGLLSSDEILFTKNKQSKELVELYAENQEAFFEQFAKSMVKMGNISPLTGAKGEIRRICRRVNHAY

SEQ ID NO: 1255 - protein, 562 aa, Arabidopsis thaliana
MASSETRMNKAREKEEAIANGVKLRALQASLMQMKSSPSSNYSLRNPSSSSAASPASRPLPNLSAHDYPVFTPSYEDEPVSAFHHKNLTLSETWDEDGVGLVDGDTYLSDSYKTSTSRKTVMMPHQDSHHHVYTMSDALRSPPLHFYTTGRSNCGSVDFRSVSSCNDYNKQKGFDTKSLKSSNLVVPLTDSHSAVVSSQPRNRGGRVMSWLFPKLKKKQKSNSIFNSPSITEKSEEVSEVLKDSGSGVEKLKRELMEANRSRDAALTQVSEMKSSLGELSEKLQYLESYCDNLKKALREATEVVSQENSGGRSSGKKNSEMPVSEEVMVEGFLQIVSEARLSIKQFLKTLVSEIDEEDSTLIGNINTLLQPHNLSFTSKYSKIIQYHLEAIISQSVYQDFENCVFQKNGKPKLLDPEQDRQANFSSFASLRNLSWNEVLKKGTKYYSDEFSRFCDEKMSLIITTLNWTRPWSEQMLQAFFVAAKCVWLLHLLAFSFNPALGILRVEENREFESSFMEDMGADRQRSALSRGPARVKVMVMPGFYVLDRVLRCKVLCRYKSLG

SEQ ID NO: 1256 - protein, 363 aa, Arabidopsis thaliana
MSSDAARTPLLPTEKIDTMAQDFNLNSRTSSSRKRRLRRSRSAPRGDCMYNDDVKIDEPPPHPSKIPMFSDLNPNLRRVIMFLALYLTIGTLCFYLVRDQISGHKTSGVVDALYFCIVTMTTVGYGDLVPNSSASRLLACAFVFSGMVLVGHLLSRAADYLVEKQEALLVRAFHLRQSFGPTDILKELHTNKLRYKCYATCLVLVVLFIVGTIFLVMVEKMPVISAFYCVCSTVTTLGYGDKSFNSEAGRLFAVFWILTSSICLAQFFLYVAELNTENKQRALVKWVLTRRITNNDLEAADLDEDGVVGAAEFIVYKLKEMGKIDEKDISGIMDEFEQLDYDESGTLTTSDIVLAQTTSQIQR

SEQ ID NO: 1257 - protein, 603 aa, Arabidopsis thaliana
MDTKIGAIDTCKPTTGDIGSPPSNAVATIQDSAPITTTSESTLGRHLSRRLVQAGVTDVFSVPGDFNLTLLDHLIAEPELNNIGCCNELNAGYAADGYARSRGVGACVVTFTVGGLSVLNAIAGAYSENLPVICIVGGPNSNDFGTNRILHHTIGLPDFSQELRCFQTVTCYQAVVNNLEDAHEQIDKAIATALKESKPVYISISCNLAATPHPTFARDPVPFDLTPRMSNTMGLEAAVEATLEFLNKAVKPVMVGGPKLRVAKASEAFLELADASGYPLAVMPSTKGLVPENHPHFIGTYWGAVSTPFCSEIVESADAYIFAGPIFNDYSSVGYSLLLKKEKAIIVHPDRVVVANGPTFGCVLMSDFFRELAKRVKRNETAYENYERIFVPEGKPLKCKPGEPLRVNAMFQHIQKMLSSETAVIAETGDSWFNCQKLKLPKGCGYEFQMQYGSIGWSVGATLGYAQATPEKRVLSFIGDGSFQVTAQDISTMIRNGQKAIIFLINNGGYTIEVEIHDGPYNVIKNWNYTGLVDAIHNGEGKCWTTKVRYEEELVEAIKTATTEKKDSLCFIEVIVHKDDTSKELLEWGSRVSAANGRPPNPQ

SEQ ID NO: 1258 - protein, 592 aa, Arabidopsis thaliana
MDVRSLPSNGVATIQDSAPTAATILGSSAATLGRHLSRRLVQAGVTDIFTVPGDFNLSLLDQLIANPELNNIGCCNELNAGYAADGYARSRGVGACVVTFTVGGLSVLNAIAGAYSENLPVICIVGGPNSNDFGTNRILHHTIGLPDFSQELRCFQTVTCYQAVVNHLEDAHEQIDKAIATALRESKPVYISISCNLAAIPHPTFASYPVPFDLTPRLSNKDCLEAAVEATLEFLNKAVKPVMVGGPKLRVAKARDAFVELADASGYPVAVMPSAKGFVPENHPHFIGTYWGAVSTLFCSEIVESADAYIFAGPIFNDYSSVGYSLLLKKEKAIIVHPDSVVVANGPTFGCVRMSEFFRELAKRVKPNKTAYENYHRIFVPEGKPLKCKPREPLRINAMFQHIQKMLSNETAVIAETGDSWFNCQKLKLPKGCGYEFQMQYGSIGWSVGATLGYAQATPEKRVLSFIGDGSFQVTAQDVSTMIRNGQKTIIFLINNGGYTIEVEIHDGPYNVIKNWNYTGLVDAIHNGEGKCWTTKVRYEEELVEAINTATLEKKDSLCFIEVIVHKDDTSKELLEWGSRVSAANGRPPNPQ

SEQ ID NO: 1259 - protein, 1031 aa, Arabidopsis thaliana
MKLSFSLVFNALTLLLQVCIFAQARFSNETDMQALLEFKSQVSENNKREVLASWNHSSPFCNWIGVTCGRRRERVISLNLGGFKLTGVISPSIGNLSFLRLLNLADNSFGSTIPQKVGRLFRLQYLNMSYNLLEGRIPSSLSNCSRLSTVDLSSNHLGHGVPSELGSLSKLAILDLSKNNLTGNFPASLGNLTSLQKLDFAYNQMRGEIPDEVARLTQMVFFQIALNSFSGGFPPALYNISSLESLSLADNSFSGNLRADFGYLLPNLRRLLLGTNQFTGAIPKTLANISSLERFDISSNYLSGSIPLSFGKLRNLWWLGIRNNSLGNNSSSGLEFIGAVANCTQLEYLDVGYNRLGGELPASIANLSTTLTSLFLGQNLISGTIPHDIGNLVSLQELSLETNMLSGELPVSFGKLLNLQVVDLYSNAISGEIPSYFGNMTRLQKLHLNSNSFHGRIPQSLGRCRYLLDLWMDTNRLNGTIPQEILQIPSLAYIDLSNNFLTGHFPEEVGKLELLVGLGASYNKLSGKMPQAIGGCLSMEFLFMQGNSFDGAIPDISRLVSLKNVDFSNNNLSGRIPRYLASLPSLRNLNLSMNKFEGRVPTTGVFRNATAVSVFGNTNICGGVREMQLKPCIVQASPRKRKPLSVRKKVVSGICIGIASLLLIIIVASLCWFMKRKKKNNASDGNPSDSTTLGMFHEKVSYEELHSATSRFSSTNLIGSGNFGNVFKGLLGPENKLVAVKVLNLLKHGATKSFMAECETFKGIRHRNLVKLITVCSSLDSEGNDFRALVYEFMPKGSLDMWLQLEDLERVNDHSRSLTPAEKLNIAIDVASALEYLHVHCHDPVAHCDIKPSNILLDDDLTAHVSDFGLAQLLYKYDRESFLNQFSSAGVRGTIGYAAPEYGMGGQPSIQGDVYSFGILLLEMFSGKKPTDESFAGDYNLHSYTKSILSGCTSSGGSNAIDEGLRLVLQVGIKCSEEYPRDRMRTDEAVRELISIRSKFFSSKTTITESPRDAPQSSPQEWMLNTDMHTM

SEQ ID NO: 1260 - protein, 470 aa, Salmonella typhimurium
MKKTKIVCTIGPKTESEEMLSKMLDAGMNVMRLNFSHGDYAEHGQRIQNLRNVMSKTGKKAAILLDTKGPEIRTIKLEGGNDVSLKAGQTFTFTTDKSVVGNNEIVAVTYEGFTSDLSVGNTVLVDDGLIGMEVTAIEGNKCICKVLNNGDLGENKGVNLPGVSIALPALAEKDKQDLIFGCEQGVDFVAASFIRKRSDVVEIREHLKAHGGENIQIISKIENQEGLNNFDEILEASDGIMVARGDLGVEIPVEEVIFAQKMMIEKCIRARKVVITATQMLDSMIKNPRPTRAEAGDVANAILDGTDAVMLSGESAKGKYPLEAVSIMATICERTDRVMNSRLDYNNDSRKLRITEAVCRGAVETAEKLEAPLIVVATQGGKSARAVRKYFPDATILALTTNEVTARQLVLSKGVVSQLVKEINSTDDFYRLGKDVALQSGLAQKGDVVVMVSGALVPSGTTNTASVHVL

SEQ ID NO: 1261 - protein, 575 aa, Arabidopsis thaliana
MLEKVETFDMNRVIDEFDEMTRNAHQVQKQTLKEILLKNQSAIYLQNCGLNGNATDPEEAFKSMVPLVTDVELEPYIKRMVDGDTSPILTGHPVPAISLSSGTSQGRPKFIPFTDELMENTLQLFRTAFAFRNRDFPIDDNGKALQFIFSSKQYISTGGVPVGTATTNVYRNPNFKAGMKSITSPSCSPDEVIFSPDVHQALYCHLLSGILFRDQVQYVFAVFAHGLVHAFRTFEQVWEEIVTDIKDGVLSNRITVPSVRTAMSKLLTPNPELAETIRTKCMSLSNWYGLIPALFPNAKYVYGIMTGSMEPYVPKLRHYAGDLPLVSHDYGSSEGWIAANVTPRLSPEEATFAVIPNLGYFEFLPVSETGEGEEKPVGLTQVKIGEEYEVVITNYAGLYRYRLGDVVKVIGFYNNTPQLKFICRRNLILSINIDKNTERDLQLSVESAAKRLSEEKIEVIDFSSYIDVSTDPGHNAIFWEISGETNEDVLQDCCNCLDRAFIDAGYVSSRKCKTIGALELRVVAKGTFRKIQEHFLGLGSSAGQFKMPRCVKPSNAKVLQILCENVVSSYFSTAF

SEQ ID NO: 1262 - protein, 475 aa, Hordeum vulgare
MAGGFRVLHLVRPFLGFLPEVQSADRRIPFREKLIYTVISLFIFLVCSQLPLYGIHSTTGADPFYWLRAILASNRGSVMELGITPIVTSGMVMQLLVGSKIIEVDNSVREDRALLNGAQKLLGILIAIGEAVAYVLSGMYGSVSQLGTGNAILIILQLFFAGIIVICLDELLQKGYGLGSGISLFIATNICENIIWKAFSPTTINSGRGAEFEGAVIGLFHLLITRTDKVRALREAFYRQNLPNVTNLLATVLVFLIVIYFQGFRVVLPVRSRNARGQQGSYPIKLFYTSNMPIILHSALITNLYFISQLLYKKFSGNFLVNLLGIWKESEYSGHSIPVGGLAYYVTAPSSLADVVANPFHALFYVVFMLSACALFSKTWIEVSGSSARDVARQLKEQQMVMPGHRESNLERELNRYIPTAAAIGGVCIGALTVLADFMGAIGSGTGILLAVTIIYQYFETFEKERATELGFFGF

SEQ ID NO: 1263 - protein, 538 aa, Cuphea lanceolata
MAAASSMAASPFCTWLVAACMSTSFENNPRSPSIKRLPRRRRVLSHCSLRGSTFQCLVTSHIDPCNQNCSSDSLSFIGVNGFGSKPFRSNRGHRRLGRASHSGEAMAVALQPAQEVATKKKPAIKQRRVVVTGMGVVTPLGHEPDVFYNNLLDGVSGISEIENFDSTQFPTRIAGEIKSFSTDGWVAPKLSKRMDKLMLYLLTAGKKALADAGITDDVMKELDKRKCGVLIGSGMGGMKLFYDALEALKISYRKMNPFCVPFATTNMGSAMLAMDLGWMGPNYSISTACATSNFCILNAANHIIRGEADMMLCGGSDAVIIPIGLGGFVACRALSQRNNDPTKASRPWDSNRDGFVMGEGAGVLLLEELEHAKKRGATIYAEFLGGSFTCDAYHMTEPHPEGAGVILCIEKAMAQAGVSREDVNYINAHATSTPAGDIKEYQALAHCFGQNSELRVNSTKSMIGHLLGAAGGVEAVTVIQAIRTGWIHPNLNLEDPDKAVDAKFLVGPEKERLNVKVGLSNSFGFGGHNSSILFAPYN

SEQ ID NO: 1264 - protein, 480 aa, Medicago sativa
MRKSVTLKAGEVPSRLTRARAVALSTSGQLPPMKEVAPGTQNQKQPLRANSKRAVSDVTYLPHEMRAILQDVTNNCGENTNRSCLNPTEIQAKKRKVAKPAQPDVSNEVPSAAERPPFIADSKRVSSMEMRLRSSEDFRCLDDLEDNAPFRMSSNQSGTNNNLLQNQTSRISARLLSSQKKASQIVAAKKGNISELLDVSKHPDVADIDADFEDPQLCSHYAADIYDHLRVAELSRRPYPNFMETVQQDITPSMRAILVDWLVEVSEGYKLQANTLFLTVYLIDWFLSKNCIERERLQLLGITCMLIATKYEEINAPRIEDFCFITDNTYVVKLESLVLKSSSYQLFAPTTKTFLRRFLRAAQASYKRPSIELEYLANYLAELTLMNYGFLNFLPSMVAASSVFLARWTLDQSSHPWNPTLEQYASYKASDLKATVLALQDLQLNSNDDCPLTAIRKKYTQDKLNCVAALSSPKLLETLF

SEQ ID NO: 1265 - protein, 333 aa, Coccidioides immitis
GNGDAWVEAQGQKYSPSQIGGFVLQKMKETAEAYLNKPVKNGVVTVPAYFNDSQRQATKDAGQIAGLNVLRVVNEPTAAALAYGLEKEQDRVVAVYDLGGGTFDISILEIQKGVFEVKSTNGDTHLGGEDFDITLVRNIVQQFKKESGIDLTGDRMAIQRIREAAEKAKIELSSALQTDINLPFITADASGAKHINVKMTRSQLESLVDPLISKTVEPVRKALKDANLQAKDIQDVILVGGMTRMPKVTESVKSIFGRDPAKSVNPDEAVAIGAAIQGAVLAGEVTDVLLLDVTPLSLGIETLGGVFTRLINRNTTIPTKKSQTFSTAADFQT

SEQ ID NO: 1266 - protein, 633 aa, Actinobacillus actinomycetemcomitans
MGKIVGIDLGTTNSCVAVMEGEKPRVIENAEGDRTTPSIIAYTNDNETLVGQPAKRQAVTNPKNTLFAIKRLIGRRFEDEEVKRDIDIMPFAITKADNGDAWVEVKGEKLAPPQISAEVLKKMKKAAEDYLGEPVTEAVITVPAYFNDAQRQATKDAGRIAGLDVKRIINEPTAAALAYGLDKGTGNKTIAVYDLGGGTFDLSIIEIDEVGGEKTFEVLATNGDTHLGGEDFDNRIINYLVDEFKKEQGIDLRNDPLAMQRLKEAAEKAKIELSSAQQTDVNLPYITADATGPKHLNIKLTRAKLESLVEDLVAKSLEPVRIALKDAGKSPSEIDDVILVGGQTRMPLVQQEVEKFFGKAPRKDVNPDEAVAIGAAVQGGVLAGDVKDVLLLDVTPLSLGIETMGGVMTTLIEKNTTIPTKKSQVFSTAEDNQSAVTIHVLQGERKQASANKSLGQFNLEGINPVPRGMPQIEVTFDIDADGIIHVSAKDKGTGKEQQITIKSSSGLSDEEIQQMVRDAEANAESDRKFEELVQARNQADHLIHSTRKQLDEAGDKVPAADRGTIESALSDLEKAAKGEDKAVIEAKIKALAEVAQKLAQTAQPHGDPQQAQSNSKPNDDVVDAEFEEVKDNK

SEQ ID NO: 1267 - protein, 499 aa, Arabidopsis thaliana
MERYTLLKEVGDGTFGNVWRAVNKQTNEVVAIKRMKKKYFSWEECVNLREVKSLSRMNHPNIVKLKEVIRENDILYFVFEYMECNLYQLMKDRPKHFAESDIRNWCFQVFQGLSYMHQRGYFHRDLKPENLLVSKDVIKIADLGLAREIDSSPPYTEYVSTRWYRAPEVLLQSYVYTSKVDMWAMGAIMAELLSLRPLFPGASEADEIYKICSVIGSPTEETWLEGLNLASVINYQFPQFPGVHLSSVMPYASADAVNLIERLCSWDPCNRPTTAEALQHPFFQSCYYIPPSLRPKLSEPRGSLEQQQSVKRLPAAPTYNANKPLNTYVTPKTNAPFSNGVNSYVTPKTNAPFSNGVNSYVTAKTNAPFSNGVNNYVAPKMNAPFDNGATQQKVDTTNNNNQNTAWNNKPVRSYNVKDSKYRPPGRKSPLAASMEKNWVFSRGASETANKLANETIGGRWTQSQRQQQPAMKAGWVGESGDMFLRPTQPSNPYSRKIAG

SEQ ID NO: 1268 - protein, 769 aa, Oryza sativa
MATTSTLHQAVAYLLAVMLVCLAPVTPASAQPWPGCPDKCGNISISYPFGIGAGCARDKDFQLECDGNTPHFNYLDDREKKLVSLSIADGEVRVFVDAGSNCHDDRFKAISGHYRTPDYGRSIAYRFSTARNRLVVLGCPVLGYLVDADDNYVTGCTSTCRRSQSQGDLPGQCTGESGCCQNTMPRALNVYKPYILTLNKTEEPTRNVPDQQELPPTEPVFRHLDSTKCQYVFVAEDKWINTTYSYRAFINRTSDFTVPVVLDWAIRNAGNCDIAVRNRTDYACRSAHSECFNASDGQGYRCRCSKGYEGNPYLDGGCKDIDECQRTKEYPCFGKCTNTIGSYTCECRPGTSGNATQENGCLPTDKFTLALKVVTGVSVGVFLLLFMLFWLYLGLQKRKLIRTKQRFFEQNGGVLLQQQMSSYGGTSGGAGGFKIFSKEELEKATNSFAADRVLGRGGYGIVYKGVLEDNMVVAIKKSKMIEEAQTKEFAKEMCILSQINHKNVVKLLGCCLEVEVPMLVYEFVSNGTLDHYIHGSTLNTVISLDSRLRIAAESAEALSYMHSSASPPILHGDVKTANILLDDKLTAKVSDFGTSKLVPNDEFEIATLVQGTCGYLDPEYLMTCQLTNKSDVYSFGVVLLELLTRKKALYFGGSEEDRSLVSCFMTAVRDGRHEELIDSQVRNEMTEEVLQEITHLVMRCVSMSGEERPMMKEVAEKLEMLRRYQLHPWDKGDANPEEKQSLLDMEQRNVDQKFRHHHDYDPENPACRS

SEQ ID NO: 1269 - protein, 1354 aa, Oryza sativa
MDTVEKIVEDFASDIAMGPFSSGTRLRDMIRAIRACKTAAEERAVVRRECAEIREAIGENQQEIRHRNMAKLMFIHMLGYPTHFGQMECLKLIAAAGYPEKRIGYLGLMLLLDERQEVLMLVTNSLKQDLNHSNQFIVGLALCALGNICSAEMARDLSPEVERLMRSRDVNTKKKAALCAIRIVRKVPDLAENFMGLASSLLKEKHHGILISAVQLCTELCKASKDALEYLRKNCVEGLVRILRDVSNSSYAPEYDVAGISDPFLHIRVLKLMRILGQGDADCSEYMNDILAQVATKNESNKNAANAILYECVQTIMGIEATSGLRVLAINILGRFLSNRDNNIRYVALNMLMRAITVDTQAVQRHRTTILECVKDADASIRKRALELVFLLVNDTNVKPLTKELVDYLDSADPDFKEDLTAKICSIVEKFSQEKLWYLDQMFKVLSLAGNHVKDDVWHALVVVISNASELQGYSVRLLYMALQAFVDQGSLVRVAVWCIGEYGEMLVNNVGMLQGEEPITIIIAIFFSAIIYLAVLGSWFCTYFGHLVEDNWRIKQIVSQNKKNIVLELQQRSIEFSSIIQRHQSIRPSLLERMPALDEASYLLRRASATQATLAADKPTPAVTPGGLKLPNGVAKPATSPLVDLLDLSSDDVPAITTASTTTAPNDFLQDLLGIGGISSSPAAAPSSASTDILIDLLSIGSSPSQNGPPAADSTPAQAITELFKINVPDTKPVSTISQVGAIVPEATDVLSSLSSSTSVSAFAKMSDTSIAGTKSAPAVPQDMDLLDGLPSNTSVSGPVNHSSITAFQSATLKINFNFKKQPEKPHETTVHATFTNLTSSSYTDFVFQAAVPKFIQLRLDPASGNIVPASGNGSVTQGFSVTNNQHGQKPLAMRIRMSYKVNGEDRLEQGQENFLDAVLNLTHAAVRDEILRLVFVSETALRLYCRRGRRKHTHDTLRASVAMVVDDGEQRACAAAAGDGDGGGDDHLSGLPDDVLLDILEKVVMDGDAHAAARTCILSRWWRHLPWHDITTVSLDVDDFIPDKENACRPVLQVHHRRATDNLAAALASFLAAPPSKRAIDKLHLKLVLTTDDDRVHRVGALVGDAFDTGRVKAGAVELEILAESACAFVDDDDEEQKRLMLGNGRRFTRLRRACPGAFRSLARLTVHNLWFDGGDTAATITHLLHGCPALEYLDMFYCGFVPFSVMTIDAPPESRLATLVFDQCHAAGVELVNAPKLLRVARRRAGGLVRRNTVAQSKLIPENPGQLERLCIKSFGTKTDNHVCSAEWRKRWPSPPARQPSPGFKHHHLAELRIRHAFGVAVDLPFARMAMEVAVNLELLAMGVESLECDG

SEQ ID NO: 1270 - protein, 127 aa, Streptococcus pneumoniae
MEEITMALNIENIIAEIKEASILELNDLVKAIEEEFGVTAAAPVAVAAADAADAGAAKDSFDVELTSAGDKKVGVIKVVREITGLGLKEAKELVDGAPALVKEGVATAEAEEIKAKLEEAGASVTLK

SEQ ID NO: 1271 - protein, 410 aa, Streptococcus pneumoniae
MSTNRKNDMMVYCSFCGKNQEEVQKIIAGNNAFICNECVELAQEIIREELVEEVLADLSEVPKPIELLHILNHYVIGQDRAKRALAVAVYNHYKRINFHDTREESEDVDLQKSNILMIGPTGSGKTFLAQTLAKSLNVPFAIADATALTEAGYVGEDVENILLKLLQVADFNIERAERGIIYVDEIDKIAKKSENVSITRDVSGEGVQQALLKIIEGTVASVPPQGGRKHPQQEMIQVDTKNILFIVGGAFDGIEEIVKQRLGEKVIGFGQNNKAIDENSSYMQEIIAEDIQKFGIIPELIGRLPVFAALEQLTVDDLVRILKEPRNALVKQYQTLLSYDDVELEFDDEALQEIANKAIERKTGARGLRSIIEETMLDVMFEVPSQENVKLVRITKETVDGTDKPILETA

SEQ ID NO: 1272 - protein, 625 aa, Hordeum vulgare
MGSHGKPPLPYAYKPLPSDAADGKRTGCMRWSACATVLTASAMAVVVVGATLLAGLRMEQAVDEEAAAGGFPWSNEMLQWQRSGYHFQTAKNYMSDPNGLMYYRGWYHMFYQYNPVGTDWDDGMEWGHAVSRNLVQWRTLPIAMVADQWYDILGVLSGSMTVLPNGTVIMIYTGATNASAVEVQCIATPADPNDPLLRRWTKHPANPVIWSPPGVGTKDFRDPMTAWYDESDETWRTLLGSKDDHDGHHDGIAMMYKTKDFLNYELIPGILHRVVRTGEWECIDFYPVGRRSSDNSSEMLHVLKASMDDERHDYYSLGTYDSAANTWTPIDPELDLGIGLRYDWGKFYASTSFYDPAKNRRVLMGYVGEVDSKRADVVKGWASIQSVPRTVALDEKTRTNLLLWPVEEIETLRLNATELTDVTINTGSVIHIPLRQGTQLDIEASFHLDASAVAALNEADVGYNCSSSGGAVNRGALGPFGLLVLAAGDRRGEQTAVYFYVSRGLDGGLHTSFCQDELRSSRAKDVTKRVIGSTVPVLDGEALSMRVLVDHSIVQGFDMGGRTTMTSRVYPMESYQEARVYLFNNATGASVTAERLVVHEMDSAHNQLSNEDDGMYLHQVLESRH

SEQ ID NO: 1273 - protein, 340 aa, Pichia anomala
MSHKASDEHHVDTDLITLSRFILTSQQKVAAQATGELTLLLNSLQFAFKFIANNIRKAELVNLMGLAGASNSTGDAQKKLDVIGDEIFINAMKASGNVKVLVSEEQEDLIVFDGPGNYAVVCDPIDGSSNIDAGVSVGTIFGIYKLLPGSKGSIKDVLRPGTEMVAAGYTMYGASAHLMLTTGQGVNGFTLDASLGEFILTHPNLTISDEKHIFSVNEGNTTYWTPEVQQFIADLKKPQFNGKPYSARYIGSMVADVHRTLLYGGLFAYPADAKSKAGKLRILYECFPMAFLFEQAGGKAVTDNGDRILELKPKAIHDRSGIWLGSKVEIDRFLKATGKI

SEQ ID NO: 1274 - protein, 479 aa, Pichia anomala
MSSFRVLDLVKPLTGYLPEVIAPERKVPFNQKLMWTGVTLLIFLVMSEIPLYGIVSSESSDPLFWLRMMLASNRGTLMELGISPIVSSGMVFQLLQGTQLLDVNLESKTDRETFQTAQKLFAILLSIGQATVYVLTGIYGRPSDLGVGVCLLLILQLVFAGIIVILLDELLQKGYGLGSGISLFMATNICEQIFWKAFAPTTVNNGRGDEFEGAVVALFHLLSVRKDKRRALVEAFYRQNLPNIFQLLATFIVFFLVVYLQGFRYEIPVRSTRQRGQNGLYPIKLFYTSNTPIMLQSALTSNFFIISQMLFQRFPLNPVVRLFGVWDARPGSAQLFASNGLAYYIQPPLSLTEALLDPIKTVIYVSFVLSVCALFSKTWIEISGTAPRDVAKQFKDQGLVIAGRRETSVYKELKRIIPTAAAFGGASIGALSVACDLLGTLGSGTSILLAVTTIYSYYEIAAKEGGFQKHIVEGFSEAF

SEQ ID NO: 1275 - protein, 391 aa, unidentified bacterium
EFQTGDVLRISMDENLEGTKEKIAVTYAGLFDDVQVGGQVLFDDGLLGTTVLEKDVANRELVVRVDNDGILGSRKGVNAPGVSINLPGITEKDADDIRFGLDHGINYIAASFVRKPEDVLEIRGLLKEKNMEHVQIVPKIESQEGIDNLDAIIAVSDGLMVPRGDMGVEIPAENVPLVQKEMIRKMNLAGLPVITATQMLDSMEENPRPTRAEASDVANAVFDGTDATMLSGESANGEYPVEAVATMAAIDEKAESSLPYYGRHQDLHFDETDSTEAVASAVSRIAHSVNAKAIVVSTNSGYTACMVSKYRPEVNILAVTYSERVQRGLTLNYGVLPVVYEAPATIDEMIALAKTAVKEQGLANSGDTIVIAAGVPMSQSGTTNMITVQTV

SEQ ID NO: 1276 - protein, 568 aa, Zymomonas mobilis
MSYTVGTYLAERLVQIGLKHHFAVAGDYNLVLLDNLLLNKNMEQVYCCNELNCGFSAEGYARAKGAAAAVVTYSVGAHSAFDAIGGAYAENLPVILISGAPNNNDHAAGHVLHHALGKTDYHYQLEMAKNITAAAEAIYTPEEAPAKIDHVIKTALAKKKPVYLEIACNIASMPCAAPGPASALFNDEASDEASLNAAVDETLKFIANRDKVAVLVGSKLRAAGAEEAAVKFTDALGGAVATMAAAKSFFPEENPHYIGTSWGEVSYPGVEKTMKEADAVIALAPVFNDYSTTGWTDIPDPKKLVLAEPRSVVVRRIRFPSVHLKDYLTRLAQKVSKKTGSLDFFKSLNAGELKKAAPADPSAPLVNAEIARQVEALLTPNTTVIAETGDSWFNAQRMKLPNGARVEYEMQWGHIGWSVPAAFGYAVGAPERRNILMVGDGSFQLTAQEVAQMVRLKLPVIIFLINNYGYTIEVMIHDGPYNNIKNWDYAGLMEVFNGNGGYDSGAAKGLKAKTGGELAEAIKVALANTDGPTLIECFIGREDCTEELVKWGKRVAAANSRKPVNKLL

SEQ ID NO: 1277 - protein, 583 aa, Lycopersicon esculentum
MSSGGCSIVWFRRDLRLEDNPALAAAVRAGSVIAVFIWAPEEEGYYCPGRVSRWWIKKSLAHLDSSLKKLGTSLITKRSNDSVSSLLQVVKSTGATRVFFNHLYDPISLVRDNCAKETLSAEGVSVCSFNADLLYEPWEVVDDESRPFSTFSDFWEKCLTMPYDPEAPLLPPKRIISGDASRCPSDNLVFESELEKGSNALLARAWSPGWSNADKALTTFINGPLIEYSKNRSKADSATTSFLSPCLHFGEVSVRKVFHRIRTKQTLWANEGNKAGEESVNLFLKSIGLREFSRYMSFYHPYSHERPLLGQLKYFPWLVDEGYFKAWRQGRTGYPLVDAGMRELWATGWLHDRIRVVVSSFSVKVLQLPWTWGMKYFWDTLLDADLESDALGWQFITGTLPDGCEFLGIDNPQFEGYKFDPNGEYVRRWLPELARLPTEWIHHPWDAPESVLQAAGIELGSNYPFPIVEIVAAKERLEEALSQMWQLEAAARSAIENGMEEGHGDSTDEFVPIAFPQAMQIEMEANNVPVRNNNPTITALRRYGDQIVPSMSSSFFRNEDEETSVDIRNSVVDSRAEVPIISM

SEQ ID NO: 1278 - protein, 207 aa, Arabidopsis thaliana
  misc_feature (188)..(188): Xaa can be any naturally occurring amino acid
EEAIASLEKQEQLLSATKREGNKTLESSIPLAATIRELLRLKAAGNEAFQSGRHTEAVEHYTAALACNVESRPFTAVCFCNRAAAYKALGQFSDAIADCSLAIALDQNYSKAISRRATLFEMIRDYGQAASDMERYVNILTKQMEEKTSGTLDRSTSMSNDIRQARIRLSELEEKSRKENSLDMYLVXGVVPSCSASDIRKAYKEGR

SEQ ID NO: 1279 - protein, 124 aa, Borrelia burgdorferi
MALNKEDILTWLEGAKTMEVVDLVTAIEEKFGVTAAVAAGVGGAVSVGSADSEEQTEFDVILMSFGDSKINVIKEVRAITGLGLGEAKALVEAAPKAIKEGLSKSDAEELKKKLEAVGAKVEVK

SEQ ID NO: 1280 - protein, 660 aa, Chlamydia trachomatis
MSEKRKSNKIIGIDLGTTNSCVSVMEGGQPKVIASSEGTRTTPSIVAFKGGETLVGIPAKRQAVTNPEKTLASTKRFIGRKFSEVESEIKTVPYKVAPNSKGDAVFDVEQKLYTPEEIGAQILMKMKETAEAYLGETVTEAVITVPAYFNDSQRASTKDAGRIAGLDVKRIIPEPTAAALAYGIDKEGDKKIAVFDLGGGTFDISILEIGDGVFEVLSTNGDTHLGGDDFDGVIINWMLDEFKKQEGIDLSKDNMALQRLKDAAEKAKIELSGVSSTEINQPFITIDANGPKHLALTLTRAQFEHLASSLIERTKQPCAQALKDAKLSASDIDDVLLVGGMSRMPAVQAVVKEIFGKEPNKGVNPDEVVAIGAAIQGGVLGGEVKDVLLLDVIPLSLGIETLGGVMTPLVERNTTIPTQKKQIFSTAADNQPAVTIVVLQGERPMAKDNKEIGRFDLTDIPPAPRGHPQIEVTFDIDANGILHVSAKDAASGREQKIRIEASSGLKEDEIQQMIRDAELHKEEDKQRKEASDVKNEADGMIFRAEKAVKDYHDKIPAELVKEIEEHIEKVRQAIKEDASTTAIKAASDELSTHMQKIGEAMQAQSASAAASSAANAQGGPNINSEDLKKHSFSTRPPAGGSASSTDNIEDADVEIVDKPE

SEQ ID NO: 1281 - protein, 125 aa, Helicobacter pylori
MAISKEEVLEYIGSLSVLELSELVKMFEEKFGVSATPTVVAGAAVAGGAAAESEEKTEFNVILADSGAEKIKVIKVVREITGLGLKEAKDATEKTPHVLKEGVNKEEAETIKKKLEEVGAKVEVK

SEQ ID NO: 1282 - protein, 637 aa, Buchnera sp.
MGKIIGIDLGTTNSCVAIMDGNKPRVLENAEGDRTTPSIIAYTQEGEVLVGQPAKRQAITNPKNTLFAIKRLIGRKFKDDEVQRDIKIMPYNIVNSDNGDAWIDVKKQKMAPPQISAEVLKKMKKTAEDYLGETIKEAVITVPAYFNDAQRQATKDAGRIAGLEVKRIINEPTAAALAYGLDKGKGNRTIAVYDLGGGTFDISIIEIDEVDKEKTFEVLATNGDTHLGGEDFDSRLINYLVTEFKKEQGIDLRNDPLSMQRLKESAEKAKIELSSAQQTDVNLPYITADSNGPKHLNIKVTRAKLESLVEDLILRSIEPLKVALKDAGLSVTDINDVILVGGQTRMPMVQSKVADFFGKEPRKDVNPDEAVAVGAAVQGGVLSGDVKDVLLLDVTPLSLGIETMGGIMTSLINKNTTIPTKHSQIFSTAEDNQSAVTIHVLQGERKRSSDNKSLGQFNLDGINPAPRGTAQIEVTFDIDSDGILHVSAKDKKTGKEQKITIKASSGLNEEEIKKMVNDAEANSEADQKFEELIQTRNQGDQLVHSIKKQLNENKNSIEEESKKDIQLALNKLENALKGEDKSDIEKNIQNLLKISSKLTEINQKKSEKDQKDNNMSANKKDENVVDAEFEEIKDPKK

SEQ ID NO: 1283 - protein, 416 aa, Chlamydophila pneumoniae
MSKKRVVVTGFGVVSCLGNEVDTFYDNLLAGVSGVRPITSFPCEDYATRFAGWIPEFNPEPYVDKKQARRVDPFITYAMVAAKKAIAMSRWDKDHLPSDPVRCGVIVGSGMGGLSTLDQGMERLLVIHKKLSPFFIPYIITNMAPALIAMDFGLMGPNYSISTACATGNYCIDAAYQHLVSGRADMIICGGTEAAVNRIGLEGFIANRALSERNDAPDQASRPWDRDRDGFVLGEGAGILVLETLESALRRDAPIFAEMLGSYVTCDAFHITAPRDDGEGITACVLGALNSAGIPKERVNYVNAHGTSTPLGDLSEVLAVKKAFGSHVRNLRMNSTKSLIGHCLGAAGGVEAVVAIQAILTGKLHPTINLDNPIAEIEDFDVVANKAQDWDIDVAMSNSFGFGGHNSTILFSRYVP

SEQ ID NO: 1284 - protein, 428 aa, Rickettsia conorii
MSNQRVNKRVVITGLGLVTPVGLNVSSSWKNIVDGVSGIKTITEFDTSKLACKIAGLIDNSEKDGFKLENFIQADDINRLSKMDKFIHYGVAAATEAVEDSGWLPDDEKSRDRTGLILGSGIGGLKMIEDTSIKLYQENNGKVSPFFIPASLINLLSGLVSIKYGFSGPNQTAVTACSTGAHAIGDAMRMIKHGYADVMIAGGAEAPVTPVGVAGFVAARALCTKYNDNPKKASRPWDKDRSGFVMGEGAGVVVLEEYEHALNRGAKVYGEVIGYGSTGDAYHMTAPHPEGRGAYRAMRDAMLDATITPDMIDYINAHGTSTTLGDGIELAAVQKLFLEANPKVLMSSTKSSIGHLLGAAGSVEFIFSALAIRDQIAPPTLNLDTPMDEVNIDLVALKAKKTKIDYVLSNSFGFGGTNASLVIKSILV

SEQ ID NO: 1285 - protein, 297 aa, Oryza sativa; identical to SEQ ID NO: 711

SEQ ID NO: 1286 - protein, 130 aa, Thermotoga maritima
MKMTIDEIIEAIEKLTVSELAELVKKLEDKFGVTAAAPVAVAAAPVAGAAAGAAQEEKTEFDVVLKSFGQNKIQVIKVVREITGLGLKEAKDLVEKAGSPDAVIKSGVSKEEAEEIKKKLEEAGAEVELK

SEQ ID NO: 1287 - protein, 594 aa, Methanocaldococcus jannaschii
MKREVENMPVVGKIIKIAGPVVVAEGMKGAQMYEVVKVGEEKLTGEIIQLHDDKAVIQVYEETSGIKPGEPVVGTGAPLSVELGPGMLRAMYDGIQRPLTAIEEKTGSIFIPRGVDVPALPRDIKWEFKPVVNEGDYVEEGDIIGTVDETPSIVHKILVPIGVKGKIVEIKEGKFTVEETVAVVETENGERKEITMMQKWPVRKPRPYKEKLPPEIPLITGQRVEDTFFTLAKGGTAAIPGPFGSGKTVTQHQLAKWSDADVVVYIGCGERGNEMTEVIEEFPHLEDIRTGNKLMDRTVLIANTSNMPVAAREASVYTGITIAEYFRDMGYGVLLTADSTSRWAEAMREISGRLEEMPGEEGYPAYLASRLAQFYERAGRVITLGKDNRQGFVCIVGAVSPPGGDFSEPVTSNTLRIVKVFWALDANLARRRHFPAINWLQSYSLYIDDVTEWWNTNTGPDWRQLRDEAMSLLQKEAELQEIVQLVGPDALPDRERVILEVARMLREDFLQQDAFDEVDTYCPPMKQYLMLKIIMTFYQEALKAVERGVEPAKILGVSVKQDIARMKYIPHDEFINVKSKEIMEKIKNELGSLN

SEQ ID NO: 1288 - protein, 436 aa, Methanocaldococcus jannaschii
MKKLIPILEKIPEVELPVKEITFKEKLKWTGIVLVLYFIMGCIDVYTAGAQIPAIFEFWQTITASRIGTLITLGIGPIVTAGIIMQLLVGSGIIQMDLSIPENRALFQGCQKLLSIIMCFVEAVLFVGAGAFGILTPLLAFLVIIQIAFGSIILIYLDEIVSKYGIGSGIGLFIAAGVSQTIFVGALGPEGYLWKFLNSLIQGVPNIEYIAPIIGTIIVFLMVVYAECMRVEIPLAHGRIKGAVGKYPIKFVYVSNIPVILAAALFANIQLWGLALYRMGIPILGHYEGGRAVDGIAYYLSTPYGLSSVISDPIHAIVYMIAMIITCVMFGIFWVETTGLDPKSMAKRIGSLGMAIKGFRKSEKAIEHRLKRYIPPLTVMSSAFVGFLATIANFIGALGGGTGVLLTVSIVYRMYEQLLREKVSELHPAIAKLLNK

SEQ ID NO: 1289 - protein, 340 aa, Methanocaldococcus jannaschii
MLFKTIFYQKLQKKVTTLFNLETERVIREIENLNKNNPKVIFQAPEGLKLKVEKEIEKIKQYFKQKNINIEIYLWGNTCFGACDLIDNHVKNLNVDLIIHYGHEKLSYANPEIKTLFIPAYHIFNKDEEEKILNDIKNFIEKHKSGGKKVAIATTIQYKKLLKDFNPSIILGCRGEVKEGDVILFVGTGRFHPLMIAYKYQKEVFIYNPLSKCFDKISEEEINKFIKKRILAISKLLLNKPKKVGVVLSTKKGQCRKRVFDEIIKLLEENDVNYLPILVDNISPDILFYDVDCYIIVACPRIVLDDYILYKKPIYTPEEFKLFLKNSFKYKFDEIKEDDF

SEQ ID NO: 1290 - protein, 409 aa, Streptococcus pyogenes
MAGSRTNDIKVYCSFCGKSQDDVKKIIAGNNVFICNECVALSQEIIKEELAEEVLADLTEVPKPKELLDVLNQYVVGQDRAKRALSVAVYNHYKRVSFTESRDDDDVDLQKSNILMIGPTGSGKTFLAQTLAKSLNVPFAIADATSLTEAGYVGEDVENILLKLIQAADYNVERAERGIIYVDEIDKIAKKGENVSITRDVSGEGVQQALLKIIEGTVASVPPQGGRKHPNQEMIQIDTKNILFIVGGAFDGIEEIVKQRLGEKVIGFGQNSRKIDDNASYMQEIISEDIQKFGLIPEFIGRLPVVAALEQLNTSDLIQILTEPRNALVKQYQALLSYDGVELAFDKEALEAIANKAIERKTGARGLRSIIEETMLDIMFEIPSQEDVTKVRITKAAVEGKSKPVLETA

SEQ ID NO: 1291 - protein, 500 aa, Streptococcus pyogenes
MNKRVKIVATLGPAVEIRGGKKYGEDGYWAGQLDVEESAKKIAELIEAGANVFRFNFSHGDHKEQGDRMATVRLAEEIARQKVGFLLDTKGPEMRTELFADDAKEFSYVTGEKIRVATTQGIQSTRDVIALNVAGSLDIYDEVEVGHTILIDDGKLGLKVIDKDIATRQFIVEVENDGIIAKQKGVNIPNTKIPFPALAERDNADIRFGLEQGLNFIAISFVRTAKDVEEVREICRETGNDHVQLFAKIENQQGIDNLDEIIEAADGIMIARGDMGIEVPFEMVPVFQKMIITKVNAAGKAVITATNMLETMTEKPRATRSEVSDVFNAVIDGTDATMLSGESANGKYPVESVRTMATIDRNAQTLLNEYGRLDSSAFPRTNKTDVIASAVKDATHSMDIKLVVTITETGNTARAISKFRPDADILAVTFDEKVQRALMINWGVIPVLAEKPASTDDMFEVAERVAVEAGLVQSGDNIVIVAGVPVGTGGTNTMRVRTVK

SEQ ID NO: 1292 - protein, 642 aa, Neisseria meningitidis
MAKVIGIDLGTTNSCLAISENGQTKVIENAEGARTTPSVIAYLDGGEILVGAPAKRQAVTNAKNTIYAAKRLIGHKFEDKEVQRDIESMPFEIIKANNGDAWVKAQGKELSPPQISAEVLRKMKEAAEAYLGEKVTEAVITVPAYFNDSQRQATKDAGRIAGLDVKRIINEPTAAALAFGMDKGDNKDRKVAVYDLGGGTFDISIIEIANLDGDKQFEVLATNGDTFLGGEDFDQRLIDHIIAEFKKEQGIDLKQDVMALQRLKEAAEKAKIELSSGQQTEINLPYITMDATGPKHLAMKITRAKFESLVEDLITRSIEPCKIALKDAGLSTGDIDDVILVGGQSRMPKVQEAVKAFFGKEPRKDVNPDEAVAVGAAIQGEVLSGGRSDVLLLDVTPLSLGIETMGGVMTKLIQKNTTIPTKASQVFSTAEDNQSAVTIHVLQGERERASANKSLGQFNLGDIAPAPRGMPQIEVTFDIDANGILHVSAKDKGTGKAANITIQGSSGLSEEEIERMVKDAEANAEEDKKLTELVASRNQAEALIHSVKKSLADYGDKLDAAEKEKIEAALKEAEEAVKGDDKAAIDAKTEALGAASQKLGEMVYAQAQAEAQAGESEQANASAKKDDDVVDADFEEVKDDKK

SEQ ID NO: 1293 - protein, 330 aa, Methanothermobacter thermautotrophicus
MSLYRLETERVIGEIRKRNAGVVGLQFPEGLKMRAVELAEQIESETGATAVISADPCFGACDVSDRKMRDMVDLIVHYGHTPLPLDYEVPVIFIEAASSVEVGEVIREAADRLSGHRRIGIATTAQHLHLLDQARSLLEERGFEVVTGEGVNTARGQVLGCNFSAIRGTDADAYLFLGSGNFHPLGIKLFTGREVVVADPYHGEVRDIEEFADRVLRVRFARISRASDASRWGVVVSSKAGQMRFELALMVKKKLEEAGREALILLAENISPAALLPFRELEAFVVTACPRIAIDDSQLYDRPLLNPSELEIVLGERSWDDYTLDEIIHG

SEQ ID NO: 1294 - protein, 111 aa, Beta vulgaris
YKAVNRESYEIVAVKKMKRKFYFWEECVNLREVKSLPSIESSNIIKLKEVVRENNDLFFIFEYMQYNLYQIMKDRHRPFTEEEIRNFLTQVLQGLAHMHRNGYFHRDLKPQ

SEQ ID NO: 1295 - protein, 120 aa, Beta vulgaris
VSEEYKLVPDTLYLTVNLIDRFLSGNYLEKQKLQLLGVTCMLIASKYEEVSAPQVEDFCYITANTYAREEVLNMERKVLNFLCFQLSVPTIKTFLRRYVHAAQATEDSLVDLEFLAKYLV

SEQ ID NO: 1296 - protein, 636 aa, Prunus cerasus
MDTNTTSYTPLPGDPFLSGPPATPRRPLKGFAVIFASVIFLMSLVALIINQGPPQQDGHHHEKQSASTASSETASFSRLPRGIAQGVSAKSNPSFSDEASYNWTNAMLSWQRTAFHFQPERNWMNDPNGPMFYKDWYHLFYQYNPNSALRGNITWGHAVSPDLIHGSTSRWLWSPIDGSMPTGLDWVCAILPDGQIVILYTGSTNESVQVQNLAYPANLSDPLLLDWVKYSGNPVLTPPAGIGSTDFRDPTTAWIGPDGLWRTTLGSKVNKTGISIVYTTANFIDYELLDGVLHAVPGTGMWECVTFYPVSINGSTGLKTSVNGPGVKHVLKASLDDTKMDHYAIGTYFVETNTWIPDDPKMDVGIGLKCDYGRYYASKTFYDQNKERRILLGWINETYTETDDLEKGWSSLQTIPRTVLFDNATGTNLLQWPVEEIEDLRLNSTEFSDVLVEAGTVVPLDIGTATQLDIFVDFEIEVLETESVNGSVGCGGGATDRSTLGPFGILVIADETLSELTPVYFRVSNSTDGDITTHFCADETRSSKAPEVYKTVYGDQVPVLDGETYSARVLVDHSIVESFAQGGRTVIASRIYPTEAIYGAARLFLFNNATGVNVKATLKIWQLNSAFIHPFPLHQI

SEQ ID NO: 1297 - protein, 123 aa, Haemophilus influenzae
MSLTNEQIIEAIASKTVTEIVELIAAMEEKFGVSAAAAVAAAPAAGGAAAAEEKTEFDVVLKSAGANKVAVIKAVRGATGLGLKEAKDLVESAPANLKEGVSKEEAEALKKELEEAGAEVEVK

SEQ ID NO: 1298 - protein, 411 aa, Haemophilus influenzae
MTDKDKDLHCSFCGKEKGEVDRLIAGTDGYICNECIELCHSMLEESHDKNLEESAVENEEKLPTPHEIRAHLDDYVIGQDYAKKVLSVAVYNHYKRLRTNYESNDVELGKSNILLIGPTGSGKTLLAQTLARRLNVPFAMADATTLTEAGYVGEDVENVLQKLLQNCEYDTEKAEKGIIYIDEIDKISRKSEGASITRDVSGEGVQQALLKLIEGTIASIPPQGGRKHPQQEMVKLDTSKILFICGGAFAGLDKIIDKRTQTSTSIGFNAKVEKDEKQQSLSELFRQVEPDDLMKFGLIPEFIGRLPMIAPLSELDEDALIQILTKPKNALIKQYQALFGLEKVELDFTPEALKAMAKKALERKTGARGLRSIVEAVLLDTMYDLPSLENLQKVIVDESTIVDNLAPKLEY

SEQ ID NO: 1299 - protein, 333 aa, Haemophilus influenzae
MKTLSEFIVERQAEYPNAKGELSGILSSIRLLAKIIHRDINKAGLTNILGQSGIENVQGESQMKLDLFAHNTMKAALMAREEVAGFASEEEESFIAFDTERGRNAKYIILTDPLDGSSNIDVNVSVGTIFSIYRRVSPIGSPVTLEDFMQPGNKQVAAGYIVYGSSTMLVYTTGNGVNGFTYDPSIGTFCLSHENMQMPKEGKIYSINEGQYLKFPQGVKKYIKYCQEEDKATHRPYVSRYIGSLVADFHRNLLKGGIYIYPSATNYPNGKLRLLYEGNPIAFLAEQAGGVATDGYRRILDIEPTALHERVPLFVGSEDMVKKAQEMMEEFKE

SEQ ID NO: 1300 - protein, 436 aa, Halobacterium sp.
MLERTYIEDVTPDDDGEDTTIAGHVHELRDLGGILFVIVRDATGRLQVVAKEDDTPDLFETAEGLSSEDVVQVTGTLEASDQAPGGVELAPTELTVVSEATDVPSIEISKDVDADLSTRLDERHLDVRKPSTKAVFSLRSKAMGAMTDWFYDNRFEEVDTPELSTAGAEGGADLFPVVYYDKEAYLSQSPQLYKQILVASGVDRLFEVGHAFRAEDFGTSRHVSEIAMFDVELGYVEDHHDVMDVQEESLRHTIRHVVEHAQRELDELGSDLSVPEADFPRITFEEAREILADEYDHVPEDDNDLDTKGERLLGEYFEEQGHPAVFVVGYPDEKFYYRQDVDGDDVASRKFDLLYRGQELSSGGQREHDIERLTAKMREQGVEPENFEFYLDAFRYGVPPHGGYGLGIDRLIQQLAGLDNIKEAILFPRDPDRLEP

SEQ ID NO: 1301 - protein, 287 aa, Halobacterium sp.
MADVIDAVFDAIADAAPEVRAGLPDHRATRDDQNASGDTQLEADVWADDLLFDRTESIEGVNWYASEERDAVVTVGDAEGGYAVALDPLDGSSNVKSNNPCGTVVGIYDQPLPAPGSSLVAAGFVLYGPTTTMVVARDDTVRESLVSETGATTDLGPVELPADPTVYGFGGRVPDWTPAFESFVRDVEDDLKLRYGGAMIADVNQVLVYGGVFGYPGMESAPDGKLRAQFEALPIAYIVETAGGASSDGTQSLLDVAPTRLHERTPTFVGTDDVIAALDAALPDHTN

SEQ ID NO: 1302 - protein, 344 aa, Halobacterium sp.
MSNEEARSAGDLRNTGLSLRHDRTWDYELDRIVDEVERKDAEKVGLQFPEGLKRRGPAVADDLRARLDDTRIMLSGQPCYGACDLDTYLMRRTDVFVHFGHSPMKESDSIIYVPLFSNVDVEPIMQEARDELHDGDVGLVTTAQHMNQFEEMRTWLEERGYTVHTRRGDDRLTNEGQVLGCNYASADIDADQVLYVGGGKFHPLGLAMEHPEKNVVIADPVNNAVSIADAEQFLKERYASVHKAMDAEQWGVIFCTKIGQGRFDQAEEIVENNDNAYLITMDEVTPDRLMNFDMDAFVNTGCPRITTDDGPQFHKPMLTPGEYEIAVGNKPLEDLSFDTFHGTW

SEQ ID NO: 1303 - protein, 280 aa, Campylobacter jejuni
MQEVISYIQKAVLEISNALKFPDTSYSQNQNFTGDTQLKFDVLSDEIITKTLSQCSSIKAIISEEKDEILTLNERANFIVAYDPLDGSSLMDVNFAIGSIFAIYEEKASAKNLRAALYSMYGARLELVICKDQPKLYRLNANNEFIFIKDLRMNEKGKINATGGTQKFWEEKHAKFIKSLFDEGYRLRYSGAMVSDINQILLKGGGIFSYPATQDAPNGKLRAFFEVFPLAFIIEKAGGKTTNGKNRSLLELEFDKIHATTPCFFGSEYEISKLLKAYNE

SEQ ID NO: 1304 - protein, 1021 aa, Arabidopsis thaliana
MFSAALETMEEVQPPVTPPIEPNGKRSEASLLDICEKVLSLDGSTCDEALKLFTETKRILSASMSNIGSGTREEVERFWFAFILYSVKRLSVRKEADGLSVSGDNEFNLCQILRALKLNIVDFFKELPQFVVKAGSVLGELYGADWENRLQAKEVQANFVHLSLLSKYYKRGFREFFLTYDANAEKNSANSSTYLLDSYRFGWLLFLALRNHAFSRFKDLVTCSNGVVSILAILIIHVPCRFRNFSIQDSSRFVKKGDKGVDLVASLCKIYDASEDELRIVIDKANNLVETILKKKPSPASECQTDKLDNIDPDGLTYFEDLLEETSISTSLITLEKDYYDGKGELDERVFINEEDSLLGSGSLSAGAVNITGVKRKIDALSSPARTFISPLSPHKSPAAKTNGISGATKLAATPVSTAMTTAKWLRTVISPLLPKPSPGLEHFLKSCDRDITNDVTRRAHIILEAIFPNSSLGAQCGGGSLQAVDLMDDIWAEQRRLEACKLYYRVLEAMCKAEAQILHANNLNSLLTNERFHRCMLACSAELVLATHKTITMLFPAVLERTGITAFDLSKVIESFIRHEDSLPRELRRHLNSLEERLLESMVWEKGSSMYNSLIVARPSLALEINQLGLLAEPMPSLDAIAALINFSDGANHASSVQKHETCPGQNGGIRSPKRLCTDYRSILVERNSFTSPVKDRLLALGNVKSKMLPPPLQSAFASPTRPNPGGGGETCAETGINIFFTKINKLAAVRINGMVERLQLSQQIRESVYCFFQHVLAQRTSLLFSRHIDQIILCCFYGVAKISQMSLTFREIIYNYRKQPQCKPLVFRSVYVDALQCRRQGRIGPDHVDIITFYNEIFIPAVKPLLVELGPVRNDRAVEANNKPEGQCPGSPKVSVFPSVPDMSPKKVSAVHNVYVSPLRGSKMDALISHSTKSYYACVGESTHAYQSPSKDLSAINNRLNNSSSNRKRTLNFDAEAGMVSDSMVANSLNLQNQNQNQNGSDASSSGGAAPLKTEPTDS

SEQ ID NO: 1305 - protein, 424 aa, Escherichia coli
MTDKRKDGSGKLLYCSFCGKSQHEVRKLIAGPSVYICDECVDLCNDIIREEIKEVAPHRERSALPTPHEIRNHLDDYVIGQEQAKKVLAVAVYNHYKRLRNGDTSNGVELGKSNILLIGPTGSGKTLLAETLARLLDVPFTMADATTLTEAGYVGEDVENIIQKLLQKCDYDVQKAQRGIVYIDEIDKISRKSDNPSITRDVSGEGVQQALLKLIEGTVAAVPPQGGRKHPQQEFLQVDTSKILFICGGAFAGLDKVISHRVETGSGIGFGATVKAKSDKASEGELLAQVEPEDLIKFGLIPEFIGRLPVVATLNELSEEALIQILKEPKNALTKQYQALFNLEGVDLEFRDEALDAIAKKAMARKTGARGLRSIVEAALLDTMYDLPSMEDVEKVVIDESVIDGQSKPLLIYGKPEAQQASGE

SEQ ID NO: 1306 - protein, 1013 aa, Arabidopsis thaliana
MEEVQPPVTPPIEPNGKRSEASLLDICEKVLSLDGSTCDEALKLFTETKRILSASMSNIGSGTREEVERFWFAFILYSVKRLSVRKEADGLSVSGDNEFNLCQILRALKLNIVDFFKELPQFVVKAGSVLGELYGADWENRLQAKEVQANFVHLSLLSKYYKRGFREFFLTYDANAEKNSANSSTYLLDSYRFGWLLFLALRNHAFSRFKDLVTCSNGVVSILAILIIHVPCRFRNFSIQDSSRFVKKGDKGVDLVASLCKIYDASEDELRIVIDKANNLVETILKKKPSPASECQTDKLDNIDPDGLTYFEDLLEETSISTSLITLEKDYYDGKGELDERVFINEEDSLLGSGSLSAGAVNITGVKRKIDALSSPARTFISPLSPHKSPAAKTNGISGATKLAATPVSTAMTTAKWLRTVISPLLPKPSPGLEHFLKSCDRDITNDVTRRAHIILEAIFPNSSLGAQCGGGSLQAVDLMDDIWAEQRRLEACKLYYRVLEAMCKAEAQILHANNLNSLLTNERFHRCMLACSAELVLATHKTITMLFPAVLERTGITAFDLSKVIESFIRHEDSLPRELRRHLNSLEERLLESMVWEKGSSMYNSLIVARPSLALEINQLGLLAEPIPSLDAIAALINFSDGANHASSVQKHETCPGQNGGIRSPKRLCTDYRSILVERNSFTSPVKDRLLALGNVKSKMLPPPLQSAFASPTRPNPGGGGETCAETGINIFFTKINKLAAVRINGMVERLQLSQQIRESVYCFFQHVLAQRTSLLFSRHIDQIILCCFYGVAKISQMSLTFREIIYNYRKQPQCKPLVFRSVYVDALQCRRQGRIGPDHVDIITFYNEIFIPAVKPLLVELGPVRNDRAVEANNKPEGQCPGSPKVSVFPSVPDMSPKKVSAVHNVYVSPLRGSKMDALISHSTKSYYACVGESTHAYQSPSKDLSAINNRLNNSSSNRKRTLNFDAEAGMVSDSMVANSLNLQNQNQNQNGSDASSSGGAAPLKTEPTDS

SEQ ID NO: 1307 - protein, 466 aa, Fibrobacter succinogenes
IDLGTTNSCVAVMEGGKPVVIANAEGFRTTPSIVAFGKNGERLVGHVAKRQAITNPEKTIYSIKRFMGRTAGECSAAEKNMPYKLVGTGSDPVRVQIDDKQFAPPEISAAVLQTMKKIAEDYLGQSVSQAVITVPAYFNDSQRQATKDAGKIAGLEVLRIVNEPTAAALAYGLDSKKSEKVAVYDLGGGTFDISILEIDDGMFSAKATNGDTMLGGDNFDEVIIDWINDEFKKENPGIDLKKDKMALQRLKDAAEKAKIDLSATTSTNINLPFITADASGPKHLDLTLSRAKFDQLTAHLVERSMEPCRKAIKDSGLSLSEIDEVILVGGSTRIPAVQEAVKKFFGKEPNKTVNPDEVVAIGAAVQAAVLSGDSAVKDVALLDVTPLSLGIETLGGVMTKLIDRNTTIPTKKSQVFSTAEDNQPAVTIHVLQGEREFVADNRTLGKFDLTDLPKKPRSVPQIEVTF

SEQ ID NO: 1308 - protein, 481 aa, Chlamydia muridarum
MIARTKIICTIGPATNTPEMLEKLLDAGMNVARLNFSHGTHESHGRTIAILKELREKRQVPLAIMLDTKGPEIRLGQVESPIKVKPGDRLTLTSKEILGSKEAGVTLYPSCVFPFVRERAPVLIDDGYIQAVVVNAQEHLIEIEFQNSGEIKSNKSLSIKDIDVALPFMTEKDITDLKFGVEQELDLIAASFVRCNEDIDSMRKVLENFGRPNMPIIAKIENHLGVQNFQEIAKASDGIMIARGDLGIELSIVEVPALQKFMARVSRETGRFCITATQMLESMIRNPLPTRAEVSDVANAIHDGTSAVMLSGETASGTYPIEAVKTMRSIIQETEKSFDYQAFFQLNDKNSALKVSPYLEAIGASGIQIAEKASAKAIIVYTQTGGSPMFLSKYRPYLPIIAVTPNRNVYYRLAVEWGVYPMLTSESNRTVWRHQACVYGVEKGILSNYDKILVFSRGAGMQDTNNLTLTTVNDVLSPSLE

SEQ ID NO: 1309 - protein, 426 aa, Xylella fastidiosa
MSEDRPSRSGDGNKILYCSFCGKSQREVRKLIAGPSVFICDECVELCNDIIREELEEKSQSARSSLPKPKEILEVLDQYVIGQQRAKRTLAVAVYNHYKRIESRHKNDDIELAKSNILLVGPTGSGKTLLAETLARLLNVPFTIADATTLTEAGYVGEDVENIIQKLLQKCDYDVERAQHGIVYIDEIDKISRKSENPSITRDVSGEGVQQALLKLIEGTVASVPPQGGRKHPQQEFLQVDTKNILFICGGAFAGLDKVIQQRCTEAGGIGFGVKVKSSESKRDVGKVLAGVEPEDLIKFGLIPEFVGRLPVVATLDELDESALVKILTEPKNAITKQFKKLFEMENVELEFRQDALSAVARKALKRKTGARGLRTIVELVLLDTMYELPSQEGISKVVVDESVIENKSEPYLIYQTMPAKVASGE

SEQ ID NO: 1310 - protein, 349 aa, Anabaena sp.
MAKASESLDLSVNESTDKALDRDCTTLSRHVLQQLQSFSADAQDLSALMNRIALAGKLVARRLSRAGLMEGVLGFTGEVNVQGESVKKMDVYANDVFISVFKQSGLVCRLASEEMDEPYYIPENCPIGRYTLLYDPIDGSSNTDTNLSLGSIFSIRQQEGDDSDGQAKDLLTNGRKQIAAGYILYGPSTMLVYTMGTGVHSFTLDPSLGEFILSEENIRIPDHGAVYSVNEGNFWQWEESMREYIRYVHRTEGYTARYSGAMVSDIHRILVQGGVFLYPGTIQNPEGKLRLLYESAPLAFLIQQAGGRATTGLVDILDVVPKKLHQRTPLIIGSKEDVAKVESFIQNGH

SEQ ID NO: 1311 - protein, 757 aa, Avena strigosa
MWRLTIGEGGGPWLKSNNGFLGRQVWEYDADAGTPEERAEVERVRAEFTKNRFQRKESQDLLLRLQYAKDNPLPANIPTEAKLEKSTEVTHETIYESLMRALHQYSSLQADDGHWPGDYSGILFIMPIIIFSLYVTRSLDTFLSPEHRHEICRYIYNQQNEDGGWGKMVLGPSTMFGSCMNYATLMILGEKRNGDHKDALEKGRSWILSHGTATAIPQWGKIWLSIIGVYEWSGNNPIIPELWLVPHFLPIHPGRFWCFTRLIYMSMAYLYGKKFVGPISPTILALRQDLYSIPYCNINWDKARDYCAKEDLHYPRSRAQDLISGCLTKIVEPILNWWPANKLRDRALTNLMEHIHYDDESTKYVGICPINKALNMICCWVENPNSPEFQQHLPRFHDYLWMAEDGMKAQVYDGCHSWELAFIIHAYCSTDLTSEFIPTLKKAHEFMKNSQVLFNHPNHESYYRHRSKGSWTLSSVDNGWSVSDCTAEAVKALLLLSKISADLVGDPIKQDRLYDAIDCILSFMNTDGTFSTYECKRTFAWLEVLNPSESFRNIVVDYPSVECTSSVVDALILFKETNPRYRRAEIDKCIEEAVVFIENSQNKDGSWYGSWGICFAYGCMFAVRALVATGKTYDNCASIRKSCKFVLSKQQTTGGWGEDYLSSDNGEYIDSGRPNAVTTSWAMLALIYAGQVERDPVPLYNAARQLMNMQLETGDFPQQEHMGCFNSSLNFNYANYRNLYPIMALGELRRRLLAIKS

SEQ ID NO: 1312 - protein, 281 aa, Euglena gracilis
MDLDYEGQAPTTSLLLLFPPHLVPEYIGTISNNLRSAEVNHRPSKTFLEEVQVDITRLMRAILVDWMNEVTEEFRLKMETLCLAVNYVDRYLSRVPVPRHQLQLVGVASLLIASKMEEIMHPQIDEFVYITDSTYNREQVLRMELSILNALRYDMTVVTPRDFVGIYLKVAQASPEVCMLADYLLELILQEYAFLHWEPSMIAASAVVLALFGFRLPCWSDDLRRITQYQPNELNACLKEMHRVFQNAPHNNLQAVREKYSHGRFMHISMVAQLPPSPPVF

SEQ ID NO: 1313 - protein, 425 aa, Agrobacterium tumefaciens
MSKVSGSNGGDSKNTLYCSFCGKSQHEVRKLIAGPTVFICDECVELCMDIIREENKTSMVKSREGVPTPQDIIKILDEYVIGQKQAKKILSVAVHNHYKRLAHASKNGDVELAKSNIMLVGPTGCGKTYLAQTLARIIDVPFTMADATTLTEAGYVGEDVENIILKLLQAADYNVERAQRGIVYIDEVDKISRKSDNPSITRDVSGEGVQQALLKIMEGTVASVPPQGGRKHPQQEFLQVDTTNILFICGGAFAGLDKIISARGEKTSIGFGATVKAEDDRRVGEVLRELEPEDLVKFGLIPEFIGRLPVLATLEDLDEDALIQILSEPKNALVKQYQRLFEMEDVELTFHEDALREIARRAITRKTGARGLRSIMEKILLDTMFELPTLEGVREVVISNDVVSGVARPLYIYADRQEEKANVSA

SEQ ID NO: 1314 - protein, 125 aa, Agrobacterium tumefaciens
MADLAKIVEDLSTLTVLEAAELSKLLEEKWGVSAAAPVAVAAAGGAGAAAAVEEEKTEFDVVLVDAGANKINVIKEVRAITGLGLKEAKDLVEGAPKAVKEAVSKAEAADLKKKLEDAGAKVDVK

SEQ ID NO: 1315 - protein, 472 aa, Clostridium acetobutylicum
MQKTKMIFTIGPSSDSEEKLKELMNAGMNAARLNFSHGTHEDHKEKIDIIKKLRKELNKNVAIVVDIKGPKIRTHNFENDKAEIKKGQTFTVMCGSEILGNSEKCSVSYDDLYKDVKKGGLLLVDDGLLEFEITDVQDKNIICKAKNNGIISNHKGVNVPGVSIGLPAVTEKDVLDLKFACKMQADLVAASFIRKAEDVSVVRKVLKENGGEDIRVISKIETQEGVDNIDKILELSDGIMVARGDMGVEIPIEDVPSIQKMIIRKCNDAGKIVITATQMLDSMIRNPRPTRAEASDVANAIYDGTDAIMLSGESASGLYPIEAAETMAKIAQKTESQIDYTKALNERKGEIITKISDAISLAACSTAAELKAAAIITATQSGITARMVSKFRPTCPIIAVTPHDDVARRLALNFGITPITSEKVVSTDELISVSIKRALNENLIKKGDLVVVVAGVPVGESGTTNMLKIQYT

SEQ ID NO: 1316 - protein, 479 aa, Clostridium acetobutylicum
MILNKGWHREKPSLLTGVEAFFILNKLINQGGTAFKIVPFGGDFLFFENLGGKFMERCLVNETEKKLEEVVKLQGWVHKLRKLGKIAFVLLRDRTGIIQCVVDAKKIDVKELKLESVVEIEGIVKENEGRFEIQVNSIKTLSKALEKIPIEINKEDMELNIDTLIENRILSMRNSRVNSVFKIETEIAHGFSEFLVKNGFTEIYTPKIVSEGAEGGTELFKLKYFDKEAYLAQSPQFYKQMMVAAGYERVFEIGHVYRAESHDTKRHLNEYISMDLEMGFINDEMDLIRFEIELLKYIFQNVRQKCSKSIELLKVEIPTIQEVPIMPLNEAITILREVYNKKELTTDIDHEGEELIGRFVKEKYNSDFVFLTHYSKDKRPMYTMPCGKNLTHSFDLIFRGMEITTGGQRINDYDMLRQSMLDKGLKVESFKSYLDVFKFGMPPHGGLAIGLERITIKLLNLDNIREAAFFVRDKKRILP

SEQ ID NO: 1317 - protein, 429 aa, Sulfolobus solfataricus
MFRTHLVSELNPKLDGSEVKVAGWVHNVRNLGGKIFILLRDKSGIGQIVVEKGNNAYDKVINIGLESTIVVNGVVKADARAPNGVEVHAKDIEILSYARSPLPLDVTGKVKADIDTRLRERLLDLRRLEMQAVLKIQSVAVKSFRETLYKHGFVEVFTPKIIASATEGGAQLFPVLYFGKEAFLAQSPQLYKELLAGAIERVFEIAPAWRAEESDTPYHLSEFISMDVEMAFADYNDIMALIEQIIYNMINDVKRECENELKILNYTPPNVRIPIKKVSYSDAIELLKSKGVNIKFGDDIGTPELRVLYNELKEDLYFVTDWPWLSRPFYTKQKKDNPQLSESFDLIFRWLEIVSGSSRNHVKEVLENSLKVRGLNPESFEFFLKWFDYGMPPHAGFGMGLARVMLMLTGLQSVKEVVPFPRDKKRLTP

SEQ ID NO: 1318 - protein, 501 aa, Streptococcus pneumoniae
MNKRVKIVATLGPAVEIRGGKKFGEDGYWGEKLDVEASAKNIAKLIEAGANTFRFNFSHGDHQEQGERMATVKLAEKIAGKKVGFLLDTKGPEIRTELFEGEAKEYSYKTGEKIRVATKQGIKSTREVIALNVAGALDIYDDVEVGRQVLVDDGKLGLRVVAKDDATREFEVEVENDGIIAKQKGVNIPNTKIPFPALAERDNDDIRFGLEQGINFIAISFVRTAKDVNEVRAICEETGNGHVQLFAKIENQQGIDNLDEIIEAADGIMIARGDMGIEVPFEMVPVYQKMIIKKVNAAGKVVITATNMLETMTEKPRATRSEVSDVFNAVIDGTDATMLSGESANGKYPLESVTTMATIDKNAQALLNEYGRLDSDSFERNSKTEVMASAVKDATSSMDIKLVVTLTKTGHTARLISKYRPNADILALTFDELTERGLMLNWGVIPMLTDAPSSTDDMFEIAERKAVEAGLVESGDDIVIVAGVPVGEAVRTNTMRIRTVR

SEQ ID NO: 1319 - protein, 783 aa, Arabidopsis thaliana
MSEMASMDPEGIDGVRMTWNVWPRTKVEASKCVIPVAACISPIRYHRDIPSVEYAPLRCRICTAALNPFARVDFLAKIWICPICFQRNHFPPHYHVMSETNVPCELYPQYTTVEYTLPNPSQPTGVGNFDQTGAVSGQPSPSVFVFVLDTCMIEEEFGYAKSALKQAIGLLPENALVGFVSFGTQAHVHELGFSDLTKVYVFRGDKEISKDQVLEQLGLGASGRRNPVGGFPMGRDNSANFGYSGVNRFLLPASDCEFTIDLLLEELQTDQWPVQAGRRQSRCTGVAISVATGLLGACFPGTGARIVALIGGPCSEGPGTIVSKDLSEPLRSHKDLDKDAAPFYKKAEKFYDALANQLVNQGHVLDLFASALDQVGVAEMKAAVERTGGLVVLSESFGHSVFKDSFKRVFEDAEESLGLCFSGTLEICCSKDIKIQGIIGPCASLQKKGPSVADTVIGEGNTTQWKMCGLDKRTCLTVFFDLSSSDQSSAPGGVNNQLYLQFMTSYQNSKGKTLQRVTTVTRQWVDTGLSTEELVQGFDQETAAVVVARLASLKMETEEGFDATRWLDRNLIRLCSKFGDYRKDDPASFTLNPNFSLFPQFTFNLRRSQFVQVFNNSPDETAYNRMLLNRENISNAAVMIQPSLTTYSFNSLPQPALLDVASIGADRILLLDSYISVVVFHGMTIAQWRNLGYQNQPEHQAFAQLLEAPQEDAQMIIRDRFPVPRLVVCDQHGSQARFLLAKLNPSATYNNASEMNAGSDIIFTDDVSLQVFFQHLQKLAVQS

SEQ ID NO: 1320 - protein, 429 aa, Sulfolobus tokodaii
MYRSHFIADVTPEYDGKEVIWAGWVHLLRDLGGKKFIILRDKTGLGQVVVDKNSSAFGISQELTQESVIQVRGIVKADKRAPRGIELHAEEITLLSKAKAPLPLDVSGKVKADIDTRLRERVLDLRRQEMQAVIKIQSLALKAFRETLYKEGFIEIFTPKIIASATEGGAQLFPVIYFGKEAFLAQSPQLYKELMAGVVERVFEVAPAWRAEESDTPFHLAEFISMDVEMAFADYNDVMQLLEKILHNIVKTIKEEGKEELKILNYEPPEVKIPIKRLKYTEAIEILRSKGYNIKFGDDIGTPELRILNEELKEDLYFIVDWPSDARPFYTKSKSENPELSESFDLIYKFLEIVSGSTRNHKREVLEEALKKKGLKPESFEFFLKWFDYGMPPHAGFGMGLARLMVMLTGIQSVKEIVPFPRDKKRLTP

SEQ ID NO: 1321 - protein, 332 aa, Sulfolobus tokodaii
MSYNFQEEYIAEEIRKRNAKKVILQFPEGLKIFSIFVIEKLKEFLPDVDFIVSSDPNWGACDIAEDEAKNINADLIIHFGHTPYTWYYPKFPTLFVPVESNLDITDEQINEVINFGKKYEAKTISLTATVQHIKLIRKISLKLSDYFDVKIGKPSSVFMFDGQILGCDYKAATSVDADLYVNISGGIFHALGVGLATGKPIVKIDPYTGKVEDLTKEVYKILKIRYAKIMEAIDKRNWGIIQGAMNGQNRPLMVKYFEKKLKEKGYNIYVFLNRVLTKDVLRNLSPSLDVFLVTSCPRLPIDDLYDFEKPVLTPGEAKMIILNNFDKYIFPW

SEQ ID NO: 1322 - protein, 646 aa, Sulfolobus tokodaii
MLKNKSFIMDNGIPLGGLGTGKIEFFPDLTIGNITIMNNWSKPLRNIRGFHIVKDGIFLQTNPGRNVPSPPEYKKVKEIKVIEKFPLIKYEIPEVNVKITIYSIINKDLKESSLPAVIIKVRGNGVFAISFPNIVGSRRAGRVNYALKKKLNGVLFTNERSLQWDPAYGNMFLGCIGCKVYAGYSFYIPSERGMTEDISPLLSLGEKDYYKIESYAREEIAGIVWKEIDGEDTFVLSWYFNGKPHHYPYGHYCENWFSNSYEVAEYIFTNEPKMGLEDEDSWINEAYRDGLYILTHSWFTKDGRFAIYEDPEISLLMNTIGAMTWDSASFPLLELYPDLVKKMDEYFGLFIRNGEVPHDLGEESIEAPIYGASYGYPWTDLGSTWVLMIYRDYKFTNDLAFLKRNYRKMKEVIDWLISLDKDKDCIPDSKGGFDNSYDGTYMYGASSYVGSMFLCALRAFISASKILGMEYSIYEDCLRRGIMTFNSLWNGKYFIAWKSDNRKKESCMSSQILGQFWCDILGLEPIIDEDKIVQALRSIYELNGKASKFCLVNSVNPDGSIDTETDQMRSCWSRVAFAVSAHMIIRGLKNEGIEIANREWETIKSLGKWNQSSRIDGMTGNKVGLPYYIGSASTWFIKFALTNFTK

SEQ ID NO: 1323 - protein, 337 aa, Yersinia pestis
MKTLGEFIVEKQLDFSHATGELTALLSAIKLGAKIIHRDINKAGLVDILGASGVSNIQGEDQMKLDLFANEKLKAALKARGEVAGIASEEEDDIVIFDGGRAENAKYVVLMDPLDGSSNIDVNVSVGTIFSIYRRITPFGTPITEEDFLQPGTKQVTAGYVVYGSSTMLVYTTGYGVHAFTYDPSLGVFCLSHEKVRYPATGCMYSINEGNYIKFPLGVKKYIKYCQEQDEATKRPYTSRYIGSLVADFHRNLLKGGIYIYPSTASHPQGKLRLLYECNPMAFLAEQAGGKATDGVNRILDIVPEKLHQRAPFFVGTKSMVEDAEGFIAKFPDEEAK

SEQ ID NO: 1324 - protein, 623 aa, Prunus persica
  misc_feature (479)..(479): Xaa can be any naturally occurring amino acid
MPAVYGSRLTTFEDSEKESEYGYVRKVSGPVVVADGMAGAAMYELVRVGHDNLIGEIIRLEGDSATIQVYEETAGLMVNDPVLRTRKPLSVELGPGILGNIFDGIQRPLKTIAKISGDVYIPRGVSVPALDKDILWEFQPKKIGEGDTLTGGDLYATVFENSLMEHHVALPPDAMGKITYVAPPGQYSLKDTVLELEFQGVKKKFTMLQTWPVRTPRPVASKVAADTPLLTGQRVLDALFPSVLGGTCAIPGAFGCGKTVISQALSKYSNSDTVVYVGCGERGNEMAEVLMDFPQLTMTLPDGREESVMKRTTLVANTSNMPVAAREASIYTGITIAEYFRDMGYNVSMMADSTSRWAEALREISGRLAEMPADSGYPAYLAARLASFYERAGKVKCLGGPERTGSVTIVGAVSPPGGDFSDPVTSATLSIVQVFWGLDKKLAQRKHFPSVNWLISYSKYSTALESFYDQFDPDFINIXTKAREVLQREDDLNEIVQLVGKDALAEGDKITLETAKLLRGDYLAQNAFTPYDKFCPFYKSVWMMRNIIHYFNLANQAVEKAAGMDGQKISYSLIKHRLGDLFYRLVSQKFEDPAEGEEVIVGKFKKLHEDLTSGFRALEDETR

SEQ ID NO: 1325 - protein, 470 aa, Yersinia pestis
MKKTKIVCTIGPKTESEEMLTNLLNAGMNVMRLNFSHGDYAEHGQRIKNLRAVMAKTGKKAAILLDTKGPEIRTMKLEGGKDAALVAGQTFTFTTDQSVVGNDKIVAVTYPGFAADLKIGNTVLVDDGLIGMEVIEVTEHTVVCKVLNSGDLGENKGVNLPGVSIQLPALAEKDKGDLIFGCEQGVDFVAASFIRKRSDVLEIREHLKAHGGEHIQIISKIENQEGLNNFDEILEASDGIMVARGDLGVEIPVEEVIFAQKMMIEKCNRARKVVITATQMLDSMIKNPRPTRAEAGDVANAILDGTDAVMLSGESAKGKYPLESVTIMATICERTDRVMPSRIESLNDNRKMRITEAVCRGAVETAEKLEAKVIVVATGGGKSAKSVRKYFPTATILALTTNEMTAHQLILTKGVITQLVDEIASTDDFYRLGKEAALASGLAQKGDVVIMVSGALVPSGTTNTSSVHVL

SEQ ID NO: 1326 - protein, 336 aa, Caulobacter crescentus
MGRSAFGSRTRMTAFVDLAARLAAEPADAALKDVVLTIAETCAQISRVVASGALSGSLGAAGSTNVQDEEQKKLDVITNDMLSDALKACGPVAGLASEELEEVEPTGRVGGYLVTFDPLDGSSNIDVNVSVGTIFSVLPAPAGHAPTEGDFLQPGRNQVAAGYAVYGPQTMLVVTLSGGVNGFTLSADGRWLLTHPDLAIKPDTAEFAINMSNQRHWAPAVRRYIDGCLQGKDGARGKNFNMRWVASMVADVHRIMMRGGVFMYPWDAREPDKPGKLRLMYEANPMSLLAERAGGKSIEGLNEILDINPAKLHQRVPVVLGSANEVEVIRAEMRAG

SEQ ID NO: 1327 - protein, 420 aa, Caulobacter crescentus
MTKAASGDTKSTLYCSFCGKSQHEVRKLIAGPTVFICDECVELCMDIIREEHKIAFVKSKDGVPTPREICEVLDDYVIGQGHAKKVLAVAVHNHYKRLNHASKNNDVELAKSNILLVGPTGTGKTLLAQTLARIIDVPFTMADATTLTEAGYVGEDVENIVLKLLQAADYNVERAQRGIVYIDEIDKISRKSDNPSITRDVSGEGVQQALLKIMEGTVASVPPQGGRKHPQQEFLQVDTTNILFICGGAFAGLEKIISARGAAKSIGFGAKVTDPEERRTGEILRNVEPDDLQRFGLIPEFIGRLPVVATLEDLDEAALVKILTEPKNAFVKQYQRLFEMENIGLTFTEDALHQVAKKAIARKTGARGLRSIMEGILLETMFELPTYEGVEEVVVNAEVVEGRAQPLLIYAEKKGGAASA

SEQ ID NO: 1328 - protein, 638 aa, Escherichia coli
MGKIIGIDLGTTNSCVAIMDGTTPRVLENAEGDRTTPSIIAYTQDGETLVGQPAKRQAVTNPQNTLFAIKRLIGRRFQDEEVQRDVSIMPFKIIAADNGDAWVEVKGQKMAPPQISAEVLKKMKKTAEDYLGEPVTEAVITVPAYFNDAQRQATKDAGRIAGLEVKRIINEPTAAALAYGLDKGTGNRTIAVYDLGGGTFDISIIEIDEVDGEKTFEVLATNGDTHLGGEDFDSRLINYLVEEFKKDQGIDLRNDPLAMQRLKEAAEKAKIELSSAQQTDVNLPYITADATGPKHMNIKVTRAKLESLVEDLVNRSIEPLKVALQDAGLSVSDIDDVILVGGQTRMPMVQKKVAEFFGKEPRKDVNPDEAVAIGAAVQGGVLTGDVKDVLLLDVTPLSLGIETMGGVMTTLIAKNTTIPTKHSQVFSTAEDNQSAVTIHVLQGERKRAADNKSLGQFNLDGINPAPRGMPQIEVTFDIDADGILHVSAKDKNSGKEQKITIKASSGLNEDEIQKMVRDAEANAEADRKFEELVQTRNQGDHLLHSTRKQVEEAGDKLPADDKTAIESALTALETALKGEDKAAIEAKMQELAQVSQKLMEIAQQQHAQQQTAGADASANNAKDDDVVDAEFEEVKDKK

SEQ ID NO: 1329 - protein, 121 aa, Escherichia coli
MSITKDQIIEAVAAMSVMDVVELISAMEEKFGVSAAAAVAVAAGPVEAAEEKTEFDVILKAAGANKVAVIKAVRGATGLGLKEAKDLVESAPAALKEGVSKDDAEALKKALEEAGAEVEVK

SEQ ID NO: 1330 - protein, 606 aa, Arabidopsis thaliana
MDTKIGSIDDCKPTNGDVCSPTNGTVATIHNSVPSSAITINYCDATLGRHLARRLVQAGVTDVFSVPGDFNLTLLDHLMAEPDLNLIGCCNELNAGYAADGYARSRGVGACVVTFTVGGLSVLNAIAGAYSENLPLICIVGGPNSNDYGTNRILHHTIGLPDFSQELRCFQTVTCYQAVVNNLDDAHEQIDKAISTALKESKPVYISVSCNLAAIPHHTYSRDPVPFSLAPRLSNKMGLEAAVEATLEFLNKAVKQVMVGGPKLRVAKACDAFVELADASGYALAMMPSAKGFVPEHHPHFIGTYWGAVSTPFCSEIVESADAYIFAGPIFNDYSSVGYSLLLKKEKAIVVQPDRITVANGPTFGCILMSDFFRELSKRVKRNETAYENYHRIFVPEGKPLKCESREPLRVNTMFQHIQKMLSSETAVIAAETGDSWFNCQKLKLPKRYEFQMQYGSIGWSVGATLGYAQASPEKRVLAFIGDGSFQVTVQDISTMLRNGQKTIIFLINNGGYTIEVEIHDGPYNVIKNWNYTGLVDAIHNGEGNCWTAKVRYEEELVEAITTATTEKKDCLCFIEVILHKGETSKELLEWGHASLLLTAVLPNPQ

SEQ ID NO: 1331 - protein, 607 aa, Arabidopsis thaliana
MDTKIGSIDACNPTNHDIGGPPNGGVSTVQNTSPLHSTTVSPCDATLGRYLARRLVEIGVTDVFSVPGDFNLTLLDHLIAEPNLKLIGCCNELNAGYAADGYARSRGVGACVVTFTVGGLSVLNAIAGAYSENLPLICIVGGPNSNDYGTNRILHHTIGLPDFTQELRCFQAVTCFQAVINNLEEAHELIDTAISTALKESKPVYISISCNLPAIPLPTFSRHPVPFMLPMKVSNQIGLDAAVEAAAEFLNKAVKPVLVGGPKMRVAKAADAFVELADASGYGLAVMPSAKGQVPEHHKHFIGTYWGAVSTAFCAEIVESADAYLFAGPIFNDYSSVGYSLLLKKEKAIIVQPDRVTIGNGPAFGCVFMKDFLSELAKRIKHNNTSYENYHRIYVPEGKPLRDNPNESLRVNVLFQHIQNMLSSESAVLAETGDSWFNCQKLKLPEGCGYEFQMQYGSIGWSVGATLGYAQAMPNRRVIACIGDGSFQVTAQDVSPMIRCGHKTIIFLINNGGYTIEVEIHDGPYNVIKNWNYTAFVEAIHNGEGKCWTPKVRCEEELVKAINTATNEEKESFCFIEVIVHKDDTSKELLEWGSRVSAANSRPPNPQ

SEQ ID NO: 1332 - protein, 223 aa, Arabidopsis thaliana
MATSMIQRMFKQGTKIVCVGRNYAAHAKELGNAVPKEPVIFLKPTSSYLENGGTIEIPHPLDSLHHEVELALVIGQKARDVPESIAMDYIGGYAVALDMTARELQASAKASGLPWTVAKGQDTFTPISSVLPKAMVRDPDNLELWLKVDGETRQKGLTKDMIFKVPYLISYISSIMTLYEGDVILTGTPEGVGPVKIGQKITAGITGLSEVQFDVERRVKPLS

SEQ ID NO: 1333 - protein, 294 aa, Arabidopsis thaliana [sequence omitted]

SEQ ID NO: 1334 - protein, 143 aa, Prunus persica
  misc_feature (38)..(38): Xaa can be any naturally occurring amino acid
DPLALPPARDGPRSMVRRQRRVDRSSTILPDGQIVILXTGSTNESVQVQNLAYPANLSDPLLLHWVKYSGNPVLTAPPGIGSTDFRDPTTAWIGPDGLWRITLGSKVNKTGISIVYTTANFIDYELLEGVLHAVPGTGMWECP

SEQ ID NO: 1335 - protein, 727 aa, Physcomitrella patens
MAACTIVWFRRDLRLEDNPALIAAARAGTVVPVFVWSPAEDGQFHPGRVSRWWLKQSLTHLELSLKKLGSPLILRKSPDMLSVLLEIAEATGATQVFYNHLYDPVSLVRDHRVKQGLSQRGIVVHTFNGDLLYEPWEVYDEEGQAFTVYEAFWKKCMSMPFEPEAPLLPPRRLTGPIGKIVGCNAEELGLEDEFEKSSNALLARAWCPGWGFANKSLDSFLRSPLIDYARDRQKADGASGTPTSLLSPHLHFGELSVRKIFHEVRKRQITWAREGNAGGEASVNMFLRALGFREYSRYLSFHFPFTHERSLLANLKSFPWRADEGYFKAWRQGRTGYPLVDAGMRELWATGWAHNRIRVVVASFSVKFLQLPWRWGMKYFWDVLLDADLECDVLGWQYISGSLPDGHELDRIENPEVEGYRFDPDGDYVRRWIPELARLPNEWVHHPWDAPPSALRAAGVELGTNYPRPIVEIGAARERLQASLAEMWERDAAMKAALANGLEEGLGETVEVAGTGGPEHERMDVPRVMVHMQRDADMSCNSSRRDQLVPEIVPNQFHIRAHESIMNRSAAMVEDGEEAGRAAVPMVFASVRRGMGGNYGGHHVEGNGGEVAQASAPIQWPTVTAVDYELDSTAESASVTGRGGSEGGTVPVWSQSVSARTPIQVREGLVPEVRRGPGLSRRQLQASVQRVNLEGMTSNKQAEEEDFYVPKLVKWTQPRKRRVKQDG

SEQ ID NO: 1336 - protein, 617 aa, Saccharomyces sp.
MAGAIENARKEIKRISLEDHAESEYGSIYSVSGPVVIAENMIGCAMYELVKVGHDNLVGEVIRIDGDKATIQVYEETAGLTVGDPVLRTGKPLSVELGPGLMETIYDGIQRPLKAIREESQSIYIPRGIDTPALSRTIKWQFTPAKFRVGDHISGGDIYGSVFENSLISSHKIILPPRSRGTITWIAPAGEYTLDEKILEVEFDGRKSDFNLYHTWPVRVPRPVTEKLSADYPLLTGQRVLDALFPCVQGGTTCIPGAFGCGKTVISQSLSKYSNSDAIIYVGCGERGNEMAEVLMEFPELYTEMSGTKEPIMKRTTLVANTSNMPVAAREASIYTGITLAEYFRDQGKDVSMIADSSSRWAEALREISGRLGEMPADQGFPAYLGAKLASFYERAGKAVALGSPDRIGSVSIVAAVSPAGGDFSDPVTTATLGITQVFWGLDKKLAQRKHFPSINTSVSYSKYTNVLNKFYDSNYPEFPVLRDRMKEILSNAEELEQVVQLVGKSALSDSDKITLDVATLIKEDFLQQNGYSSYDAFCPIWKTYDMMRAFISYHDEAQKAAANGANWSKLADSTGDVKHAVSSSKFFEPSRGEKEVHGEFEKLLSTMQERFAESTD

SEQ ID NO: 1337 - protein, 423 aa, Salmonella typhimurium
MTDKRKDGSGKLLYCSFCGKSQHEVRKLIAGPSVYICDECVDLCNDIIREEIKEVAPHRERSALPTPHEIRTHLDDYVIGQEQAKKVLAVAVYNHYKRLRNGDTSNGVELGKSNILLIGPTGSGKTLLAETLARLLDVPFTMADATTLTEAGYVGEDVENIIQKLLQKCDYDVQKAQRGIVYIDEIDKISRKSDNPSITRDVSGEGVQQALLKLIEGTVAAVPPQGGRKHPQQEFLQVDTSKILFICGGAFAGLDKVIANRVETGSGIGFGATVKAKSDKASEGELLSQVEPEDLIKFGLIPEFIGRLPVVATLNELSEEALIQILKEPKNALTKQYQALFNLEGVDLEFRDEALDAIARKAMARKTGARGLRSIVEAALLDTMYDLPSMEDVEKVVIDESVIAGQSKPLLIYGKPEAQASGE

SEQ ID NO: 1338 - protein, 413 aa, Salmonella typhimurium
MSKRRVVVTGLGMLSPVGNTVESTWKALLAGQSGISLIDHFDTSAYATKFAGLVKDFNCDDIISRKEQRKMDAFIQYGIVAGVQAMQDSGLEVTEENASRIGAAIGSGIGGLGLIEENHSSLVKGGPRKISPFFVPSTIVNMVAGHLTIMYGLRGPSISIATACTSGVHNIGHAARIIAYGDADAMVAGGAEKASTPLGVGGFGAARALSTRNDNPQAASRPWDKERDGFVLGDGAGMLVLEEYEHAKARGAKIYAEIVGFGMSSDAYHMTSPPENGAGAALAMVNALRDAAIEPAQIGYVNAHGTSTPAGDKAETQAVKSVFGDAASRVMVSSTKSMTGHLLGAAGAVESIFSILALRDQAIPPTINLDNPDEGCDLDFVPHEARQVSDLEYALCNSFGFGGTNGSLIFKKI

SEQ ID NO: 1339 - protein, 605 aa, Aspergillus oryzae
MAPSGKGSQDEAHHGAVFSVSGPVVVAENMIGCAMYELCRVGKDQLVGEVIRLDGDKATIQVYEETDGVTVGDPVERTGKPLAVELGPGFMETIYDGIQCPLKAIFHQSKGIYIPRGITVNALDREKKWDFTPGQYKVGDHITGGDVWGSVFENSLLNDHKILLPPRARGTITRIAEAGSYTVEEKLLEIEFNGKKSEFGMMQTWAVRVPDQSTIGSIDAPFIVGQRVLDSLFPSVQGGTVCIPGAFGCGKTVISQSVSKSSNSDIIVYVGCGERGNEMAEVLMDFPELSIEIDGRKEPIMKRTCLIANTSNMPVAAREASIYTGITIAEYFRDQGKNVAMMADSSSRWAEALRELSGRLGEMPADQGFPAYLGAKLASFYERAGKSVALGSPERIGSVSIVGAVSPPGGDFSDPVTTSTLGIVQVFWGLDKKLAQRKHFPSINTSMSYSKYTTVLDKFYEKNYPEFPRLRDQIRELLTKSEELDQVVQLVGKAALGDSDKIALDVAAMVKDDFLQQNGYSDYDQFCPLWKTEYMMKAFMGYHDEAQKAIAQGQNWAKVREPLPTSRLPCGTYSCEVPENQQEVSEKYEKVLQTMSERFASVSDE

SEQ ID NO: 1340 - protein, 710 aa, Oryza sativa
MSASPSSMSGAGAGEAGVRTVVWFRRDLRVEDNPALAAAARAAGEVVPVYVWAPEEDGPYYPGRVSRWWLSQSLKHLDASLRRLGASRLVTRRSADAVVALIELVRSIGATHLFFNHLYDPLSLVRDHRVKALLTAEGIAVQSFNADLLYEPWEVVDDDGCPFTMFAPFWDRCLCMPDPAAPLLPPKRIAPGELPARRCPSDELVFEDESERGSNALLARAWSPGWQNADKALAAFLNGPLMDYSVNRKKADSASTSLLSPYLHFGELSVRKVFHQVRMKQLMWSNEGNHAGDESCVLFLRSIGLREYSRYLTFNHPCSLEKPLLAHLRFFPWVVDEVYFKVWRQGRTGYPLVDAGMRELWATGWLHDRIRVVVSSFFVKVLQLPWRWGMKYFWDTLLDADLESDALGWQYISGSLPDGRELDRIDNPQLEGYKFDPHGEYVRRWLPELARLPTEWIHHPWDAPESVLQAAGIELGSNYPLPIVELDAAKTRLQDALSEMWELEAASRAAMENGMEEGLGDSSDVPPIAFPPELQMEVDRAPAQPTVHGPTTAGRRREDQMVPSMTSSLVRAETELSADFDNSMDSRPEVPSQVLFQPRMEREETVDGGGGGGMVGRSNGGGHQGQHQQQQHNFQTTIHRARGVAPSTSEASSNWTGREGGVVPVWSPPAASGPSDHYAADEADITSRSYLDRHPQSHTLMNWSQLSQSL

SEQ ID NO: 1341 - protein, 638 aa, Salmonella enterica
MGKIIGIDLGTTNSCVAIMDGTQARVLENAEGDRTTPSIIAYTQDGETLVGQPAKRQAVTNPQNTLFAIKRLIGRRFQDEEVQRDVSIMPYKIIGADNGDAWLDVKGQKMAPPQISAEVLKKMKKTAEDYLGEPVTEAVITVPAYFNDAQRQATKDAGRIAGLEVKRIINEPTAAALAYGLDKEVGNRTIAVYDLGGGTFDISIIEIDEVDGEKTFEVLATNGDTHLGGEDFDTRLINYLVDEFKKDQGIDLRNDPLAMQRLKEAAEKAKIELSSAQQTDVNLPYITADATGPKHMNIKVTRAKLESLVEDLVNRSIEPLKVALQDAGLSVSDINDVILVGGQTRMPMVQKKVAEFFGKEPRKDVNPDEAVAIGAAVQGGVLTGDVKDVLLLDVTPLSLGIETMGGVMTPLITKNTTIPTKHSQVFSTAEDNQSAVTIHVLQGERKRASDNKSLGQFNLDGINPAPRGMPQIEVTFDIDADGILHVSAKDKNSGKEQKITIKASSGLNEEEIQKMVRDAEANAESDRKFEELVQTRNQGDHLLHSTRKQVEEAGDKLPADDKTAIESALSALETALKGEDKAAIEAKMQELAQVSQKLMEIAQQQHAQQQAGSADASANNAKDDDVVDAEFEEVKDKK

SEQ ID NO: 1342 - protein, 423 aa, Salmonella enterica
MTDKRKDGSGKLLYCSFCGKSQHEVRKLIAGPSVYICDECVDLCNDIIREEIKEVAPHRERSALPTPHEIRTHLDDYVIGQEQAKKVLAVAVYNHYKRLRNGDTSNGVELGKSNILLTGPTGSGKTLLAETLARLLDVPFTMADATTLTEAGYVGEDVENIIQKLLQKCDYDVQKAQRGIVYIDEIDKISRKSDNPSITRDVSGEGVQQALLKLIEGTVAAVPPQGGRKHPQQEFLQVDTSKILFICGGAFAGLDKVIANRVETGSGIGFGATVKAKSDKASEGELLSQVEPEDLIKFGLIPEFIGRLPVVATLNELSEEALVQILKEPKNALTKQYQALFNLEGVDLEFRDEALNAIARKAMARKTGARGLRSIVEAALLDTMYDLPSMEDVEKVVIDESVIAGQSKPLLIYGKPEAQASGE

SEQ ID NO: 1343 - protein, 413 aa, Salmonella enterica
MSKRRVVVTGLGMLSPVGNTVESTWKALLAGQSGISLIDHFDTSAYATKFAGLVKDFNCDDIISRKEQRKMDAFIQYGIVAGVQAMQDSGLEVTEENASRIGAAIGSGIGGLGLIEENHSSLVKGGPRKISPFFVPSTIVNMVAGHLTIMYGLRGPSISIATACTSGVHNIGHAARIIAYGDADAMVAGGAEKASTPLGVGGFGAARALSTRNDNPQAASRPWDKERDGFVLGDGAGMLVLEEYEHAKARSAKIYAEIVGFGMSSDAYHMTSPPENGAGAALAMVNALRDAAIEPAQIGYVNAHGTSTPAGDKAETQAVKSVFGDAASRVMVSSTKSMTGHLLGAAGAVESIFSILALRDQAIPPTINLDNPDEGCDLDFVPHEARQVSDLEYALCNSFGFGGTNGSLIFKKI

SEQ ID NO: 1344 - protein, 470 aa, Salmonella enterica
MKKTKIVCTIGPKTESEEMLSKMLDAGMNVMRLNFSHGDYAEHGQRIQNLRNVMSKTGKKAAILLDTKGPEIRTIKLEGGNDVSLKAGQTFTFTTDKSVVGNNEIVAVTYEGFTSDLSVGNTVLVDDGLIGMEVTAIEGNKVICKVLNNGDLGENKGVNLPGVSIALPALAEKDKQDLIFGCEQGVDFVAASFIRKRSDVVEIREHLKAHGGENIQIISKIENQEGLNNFDEILEASDGIMVARGDLGVEIPVEEVIFAQKMMIEKCIRARKVVITATQMLDSMIKNPRPTRAEAGDVANAILDGTDAVMLSGESAKGKYPLEAVSIMATICERTDRVMNSRLDYNNDSRKLRITEAVCRGAVETAEKLKAPLIVVATQGGKSARAVRKYFPDATILALTTNEVTARQLVLSKGVVSQLVKEINSTDDFYRLGKDVALQSGLAQKGDVVVMVSGALVPSGTTNTASVHVL

SEQ ID NO: 1345 - protein, 332 aa, Salmonella enterica
MKTLGEFIVEKQHEFSQATGELTALLSAIKLGAKIIHRDINKAGLVDILGASCAENVQGEVQQKLDLFANEKLKAALKARDIVAGIASEEEDEIVVFEGCEHAKYVVLMDPLDGSSNIDVNVSVGTIFSIYRRVTPVGTPVTEEDFLQPGNKQVAAGYVVYGSSTMLIYTTGCGVHAFTYDPSLGVFCLCQERMRFPEKGKTYSINEGNYIKFPNGVKKYIKFCQEEDSSTSRPYTSRYIGSLVADFHRNLLKGGIYLYPSTASHPQGKLRLLYECNPMAFLAEQAGGKASDGKERILDIIPESLHQRRSFFVGNRHMVDDVERFIREYPDA

SEQ ID NO: 1346 - protein, 436 aa, Raphanus sativus
MKGVRKTYDNSYTLSFFLLFFVFILFRPAFSMNTLSATESLTISSNKTLVSPGNVFELGFFRTNSSSRWYLGIWYKKLTNRIYVWVANRDNPLSSSTGTLKFSGNNLVLLGDSNKSFWTTNFTRGNGDLRWVAELLANGNFVMRDSNNNDSSGFLWQSFDFPTDTLLPEMKLGYDLKKGLNRFLISWRSSDDPSSGEYSYKLEPRSFPEFYVFSDDIRVHRSGPWNGIQFSGIQEDQKSSYVVYNFTENGEEVAYTFQMTNNSIYSRLIISSAGYFQRLTWNPSSETWNMFWSSPASLQCDPYMVCGAYAYCDVNASPMCNCIQGFDPRNMEKWNLRSQSSGCIRKTRLSCSGDGFTRMKNMKLPETTMATVDRSIGVKECEKRCLSDCNCTAFANADIRNGGTGCVIWTGELEDIRTYVADGQDLYVRLAAADLV

SEQ ID NO: 1347 - protein, 422 aa, Galdieria sulphuraria
EFGTRKDVQVYFIQVLLYLYKEECQEITTAKDIFLIRWISIKMIAVQPQPKKTPVAEYLQTSQDTPTSLTRYLLEVAKQNKDMGDMVALINGIQFACKKIASLVGKAGVTDLMGIYQQGIVNVHGEEQKKLDVLSNEVLKNALKYSGKMAVIASEEEDVPIMVEESYSGNYVVVFDPLDGSSNLDAGLPTGTIFGVFQQQFSCLIHDYEESIDNMELACLQNTLQPGRRLIAAGYCIYSSSTMLVLSLGNGLHCFTLDTEVGEFVLTRANIQIPQRGNIYSFNESNFYQWDKGVQDYIERLKKGNNQTNCRYSARYVGSMVADVHRTILYGGIFGYPADKKNVSGKLRLVYECAPMAYLVEQAGGKATTGIENILDLTPKDIHERKPLILGSPADIEEFLQVYGMSRVDREDMHMWDNLSSL

SEQ ID NO: 1348 - protein, 264 aa, Synechocystis sp.
MNAVAACFNALRQRGECALIPFLTAGDPDLATTAEALRILDRAGADLIELGVPYSDPLADGPVIQAAATRALQKGVKLDDVLAIVREVHQDIAAPIILFTYYNPIFYQGVEVFLDKIKAAGVKGLVVPDLPLEESDRLLEATAERGLELILLVAPTSSPERQTAIAKKSQGFVYLVSVTGVTGVRTEVGSRVEALLAGMRQVTDKPIGVGFGISQPEQAEQVKAWGADAVIVGSAMVKRLAEGTPTEGLQALETFCRELKTAIS

SEQ ID NO: 1349 - protein, 416 aa, Synechocystis sp.
MANLEKKRVVVTGLGAITPIGNTLQDYWQGLMEGRNGIGPITRFDASDQACRFGGEVKDFDATQFLDRKEAKRMDRFCHFAVCASQQAINDAKLVINELNADEIGVLIGTGIGGLKVLEDQQTILLDKGPSRCSPFMIPMMIANMASGLTAINLGAKGPNNCTVTACAAGSNAIGDAFRLVQNGYAKAMICGGTEAAITPLSYAGFASARALSFRNDDPLHASRPFDKDRDGFVMGEGSGILILEELESALARGAKIYGEMVGYAMTCDAYHITAPVPDGRGATRAIAWALKDSGLKPEMVSYINAHGTSTPANDVTETRAIKQALGNHAYNIAVSSTKSMTGHLLGGSGGIEAVATVMAIAEDKVPPTINLENPDPECDLDYVPGQSRALIVDVALSNSFGFGGHNVTLAFKKYQ

SEQ ID NO: 1350 - protein, 591 aa, Solanum dulcamara
MGTPKEEATDEVFSENLEQKPDPDPATSKSELKETTSKSISGELQKRLSQCDKGINMSQSNQEAISLSRVQENQSENVQKQLGLKSEADASGSSQLSSLPKDSDAKSRGSESSVKDKVVSVLSGMASDSSDQMQTSNMEVFVSQSDQQRVSYQIKREKALDKLQPRRNPDTSVHGLTSDQGMTLSKAPEKPSEDGYNWRKYGQKLVKGNEFTRSYYKCTYPNCLAKKQVERSHDGHITDIHYIGKHEHPETLSVPQMSPELVLPLQMIQQDIPIITALEAEGEKSTTPRETCEPSKPSEVPLALDVVSACGGVKVTPLKQHKLENEVDKDDVPDSKRQKKDIVATDYTPPVKSHSEPRHIVQTMSEVDIINDGQRWPKYGQKIVKGNPNPRSYYRCSVAGCPVKKHVERASHDPKLVITTYEGHHVHDFPTSKAIGQISAAPDTGTAGVREDSRIESGESKHVVESKSESGENKHIREPKTEAGGNKRVGESIPESGENKHIREPKTEAGENKHIGESRIESGGNKHVEKSKLELGGNKHVGESIPKPGGNKHVGESIPESGGNKHVGESIPESGENKHVGLDMAVHIGAN

SEQ ID NO: 1351 - protein, 599 aa, Physcomitrella patens
MALRIENPYYKLLDTDEEIVEDFELMSRNARETQLELLRKILERNANVEYLQRQGLNGRTDEASFKACVPVSTYANIEADVDRIADGDTSPICCVDPPTSFALSSGTTGGKCKLIPRTDALLAQAMKAGQIGSVYRRRAFPRKHEGPPVVMSFQYAGRQFDTKSGLKAGTGTTNFYRSAAFKNAKSAPFSATSPVDIVLGYDVPQQMYCHLLCGLYRCQEVEQMSAIFAYMIVEPFRLLERVWRDICKDIREGTVNERVSDPELRSSVLKVLSPNPELADLIERECAKGWSGIIERLFPNINYIMSIFSGSMLPYVAPMRQYAGSVPLMNADYGASEAWIGINLDPRCPAEDASFTIIPNFAYFEFIPVNRDSAGYDSVEGDEIVGLTDVKVGQEYEIVLTTVGGLYRYRLGDIVKVTGFFNSTPKVAFVCRKGVVLSVNTDKTDEEELRLVVGKASLLLKESNMELADYSSYTDQDSQPGHYVIFWELRSHEHLDMDLLSECCKVLDQSFNNPYMRGRAARTIGPLELAIVKEGAFARLMEQFVRKNGVGASQYKVSRCFKNPATLKHFRDETIATLRSPDFPPELLAAWRPSTKIVG

SEQ ID NO: 1352 - protein, 532 aa, Adiantum capillus-veneris
MSEQGCYTDCWGAIWWIWESGIKAMAGLEGEIQTRRLRGREIPVLPPVTRSAAASAANVGYNENTRKTKVSTKRAAADDTSSRVASNVPVQHAKKRAALANLTNQSNSAITRNSSLPSKSHASAVNGKTRAAAGQVKEVQQVAQQVVEPLQEVGREPNTGRSSLANSSITFDNDENACPERATSSVGMKSRTLDVLQLVGNENKTVASLERKTQHSLYISKDTKPRARQGGLFEDCKDDNEEGGWSSKNYMDIDNHKDPQMCSAYAAEIYHHLRMAELKRRPSLNFMDTVQQDINASMRGILVDWLVEVAEEYKLVPDTLYLTISYIDRFLSGNLVTRQRLQLLGVASMLIASKYEEICAPQVDEFCYITDNTYNREEVLEMERSVLNHLHFELTGPTTKSFLRRFVRAAQAGQKSPTLQLEFLGNYLAELTLLEYGFLHFLPSMIAGAAVLVARVTLNPTWRPWNSTLQHYSGYKASELKECAKAILELQKNTKNCTLPAIREKYRQHKFKCVATLHPPASIPAEYFDDIE

SEQ ID NO: 1353 - protein, 172 aa, Citrus aurantium
YHLFYQYNPNGAIWGDIVWGHAVSKDLIHWYHLPLAMVADQWYDIMGVWTGSATILPDGKLMMLYTGSTNESVQVQNLAYPADPSDPLLIKWVKYPGNPVLVPPPGIGAKDFRDPTTAWLTSEGKWRIAIGSRINRTGITFVYDTKDFINYELLRGVLHGVPNTGMWECPDF

SEQ ID NO: 1354 - protein, 436 aa, Brassica napus
MKGIRKNYENSYTLSFLLVFFVLILLPPAFSINTLSSEESLTISSNRTLVSRGDVFELGFFKTTSSSRWYLGIWYKKFPYRTYVWVANRDNPLPNSIGTLKISNMNLVLLDHSNKSVWSTNLTRRNERTPVMAELLANGNFVMRDSNNNDASEFLWQSFDYPTDTLLPEMKLGYNLKKGLNRFLISWRSSDDPSSGDYSYKLEPRRLPEFYLLQGDVREHRSGPWNGIRFSGILEDQKLSYMEYNFTETSEEVAYTFRMTNNSFYSRLTLSSTGYFERLTWAPSSVVWNVFWSSPNHQCDMYKICGPYSYCDVTTSPVCNCIQGFRPKNRQQWDLRISLRGCIRRTRLSCSGDGFARMKYMKLPETTMAIVDRSIGVKECEKRCLSDCNCTAFANADVRNGGTGCVIWTGRLDDMRNYVPDHGQDLYVRLAAADLV

SEQ ID NO: 1355 - protein, 623 aa, Gossypium hirsutum
MPAVYGSRLTTFEDSEKESEYGYVRKVSGPVVVADGMAGAAMYELVRVGHDNLIGEIIRLEGDSATIQVYEETAGLMVNDPVLRTHKPLSVELGPGILGNIFDGIQRPLKTIAKRSGDVYIPRGVSVPALDKDALWDFQPKKIGEGDLLTGGDLYATVFENSLMQHHVALPPDAMGKITYIAPPGQYSLKDTVLELEFQGVKKQFTMLQTWPVRTPRPVATKLAADTPLLTGQRVLDALFPSVLGGTCAIPGAFGCGKTVISQALSKYSNSDAVVYVGCGERGNEMAEVLMDFPQLTMTLPDGREESVMKRTTLVANTSNMPVAAREASIYTGITIAEYFRDMGYNVSMMADSTSRWAEALREISGRLAEMPADSGYPAYLAARLASFYERAGKVKCLGGPERTGSVTIVGAVSPPGGDFSDPVTSATLSIVQVFWGLDKKLAQRKHFPSVNWLISYSKYSGALESFYEKFDPDFISIRTKAREVLQREDDLNEIVQLVGKDALAETDKITLETAKLLREDYLAQNAFTPYDKFCPFYKSVWMMRNIVHFNALANQAVEKAAGMDGQKITYSLIKHRLGDLFYRLVSQKFEDPAEGEEALVAKFKKLNEDLTAGFRALEDETR

SEQ ID NO: 1356 - protein, 638 aa, Salmonella typhimurium
MGKIIGIDLGTTNSCVAIMDGTQARVLENAEGDRTTPSIIAYTQDGETLVGQPAKRQAVTNPQNTLFAIKRLIGRRFQDEEVQRDVSIMPYKIIGADNGDAWLDVKGQKMAPPQISAEVLKKMKKTAEDYLGEPVTEAVITVPAYFNDAQRQATKDAGRIAGLEVKRIINEPTAAALAYGLDKEVGNRTIAVYDLGGGTFDISIIEIDEVDGEKTFEVLATNGDTHLGGEDFDTRLINYLVDEFKKDQGIDLRNDPLAMQRLKEAAEKAKIELSSAQQTDVNLPYITADATGPKHMNIKVTRAKLESLVEDLVNRSIEPLKVALQDAGLSVSDINDVILVGGQTRMPMVQKKVAEFFGKEPRKDVNPDEAVAIGAAVQGGVLTGDVKDVLLLDVTPLSLGIETMGGVMTPLITKNTTIPTKHSQVFSTAEDNQSAVTIHVLQGERKRASDNKSLGQFNLDGINPAPRGMPQIEVTFDIDADGILHVSAKDKNSGKEQKITIKASSGLNEEEIQKMVRDAEANAESDRKFEELVQTRNQGDHLLHSTRKQVEEAGDKLPADDKTAIESALNALETALKGEDKAAIEAKMQELAQVSQKLMEIAQQQHAQQQAGSADASANNAKDDDVVDAEFEEVKDKK

SEQ ID NO: 1357 - protein, 470 aa, Salmonella typhimurium
MKKTKIVCTIGPKTESEEMLSKMLDAGMNVMRLNFSHGDYAEHGQRIQNLRNVMSKTGKKAAILLDTKGPEIRTIKLEGGNDVSLKAGQTFTFTTDKSVVGNNEIVAVTYEGFTSDLSVGNTVLVDDGLIGMEVTAIEGNKVICKVLNNGDLGENKGVNLPGVSIALPALAEKDKQDLIFGCEQGVDFVAASFIRKRSDVVEIREHLKAHGGENIQIISKIENQEGLNNFDEILEASDGIMVARGDLGVEIPVEEVIFAQKMMIEKCIRARKVVITATQMLDSMIKNPRPTRAEAGDVANAILDGTDAVMLSGESAKGKYPLEAVSIMATICERTDRVMNSRLDYNNDSRKLRITEAVCRGAVETAEKLEAPLIVVATQGGKSARAVRKYFPDATILALTTNEVTARQLVLSKGVVSQLVKEINSTDDFYRLGKDVALQSGLAQKGDVVVMVSGALVPSGTTNTASVHVL

SEQ ID NO: 1358 - protein, 473 aa, Salmonella typhimurium
MSRLVVVSNRIAPPDNKGGAGGLAVGVLGALKAAGGLWFGWSGETGNEDEPLKKVTKGNITWASFNLSEQDYEDYYCQFSNAVLWPAFHYRLDLVQFQRPAWEGYMRVNALLADKLLPLIKENDIIWVHDYHLLPFASELRKRGVNNRIGFFLHIPFPTPEIFNALPPHDELLEQLCDFDLLGFQTENDRLAFLDSLSSQTRVTTRSGKQHIAWGKDFQTEVYPIGIEPDEIALQAAGPLPPKLAQLKAELKNVKNIFSVERLDYSKGLPERFLAYEALLENYPQHRGKIRYTQIAPTSRGEVQAYQDIRHQLETEAGRINGKYGQLGWTPLYYLNQHFDRKLLMKIFRYSDVGLVTPLRDGMNLVAKEFVAAQDPANPGVLVLSQFAGAANELTSALIVNPYDRDDVAAALNRALTMPLAERISRHAEMLDVIVKNDINRWQERFIHDLKEVTPRSPERQQQNNVATFPKLA

SEQ ID NO: 1359 - protein, 332 aa, Salmonella typhimurium
MKTLGEFIVEKQHEFSQATGELTALLSAIKLGAKIIHRDINKAGLVDILGASGAENVQGEVQQKLDLFANEKLKAALKARDIVAGIASEEEDEIVVFEGCEHAKYVVLMDPLDGSSNIDVNVSVGTIFSIYRRVTPVGTPVTEEDFLQPGNKQVAAGYVVYGSSTMLVYTTGCGVHAFTYDPSLGVFCLCQERMRFPEKGKTYSINEGNYIKFPNGVKKYIKFCQEEDSSTSRPYTSRYIGSLVADFHRNLLKGGIYLYPSTASHPQGKLRLLYECNPMAFLAEQAGGKASDGKERILDIIPESLHQRRSFFVGNRHMVDDVERFIREYPDA

SEQ ID NO: 1360 - protein, 120 aa, Listeria innocua
MALNIEEIIASVKEASVLELNDLVKAIEEEFGVTAAAPVAVAAAGGGAAEQTEFTVELASAGDSKIKVIKVVREITGLGLKEAKELVDNAPKALKEGVAKDEAEEIKAKLEEVGANVEVK

SEQ ID NO: 1361 - protein, 585 aa, Listeria innocua
MKKTKIVCTIGPASESVDTLVQLIEAGMNVARLNFSHGDFEEHGARIVNIREASKKTGKQVAILLDTKGPEIRTNDMVGGKLEFQTGDVVRVSMTPVEGTKEKFSVTYGELYDDVEIGSSILLDDGLIGLEVIEKDEANRELVTKVLNPGVLKNKKGVNVPNVSINLPGITEKDAADIRFGLEQGIDFIAASFVRRATDVLEITKILEEHNATHVQIIPKIENQEGVDNIDEILQVSQGLMVARGDLGVEIPAEEVPIVQKELIRKCNKLGKPVITATQMLDSMQRNPRPTRAEASDVANAIFDGTDAIMLSGETAAGDYPVEAVKMMAKIAVRTEEVLVAQDKFALKLHENTDMTEAIGQAVGHTAKNLNVQTIVAATQSGHTARMISKYRPKSHIVAVTFNEHVYRGLALSWGVYPRLATPVSNTDEMFDLAVKESLASGVAKQGDLIIITAGVPVTESGTTNVMKIQLIGEKVVKGQGIGSKSVIGKAVVAKSNAEALQKAEEGGILIVKTTDKEILPAFEKSAAVVVEEGGLTSHAAVVGINLGIPVIVGAKDATSLVKDGEIITVDSRQGVVYNGKTATH

SEQ ID NO: 1362 - protein, 607 aa, Neurospora crassa
MAPQQNGAEVDGIHTGKIYSVSGPVVVAEDMIGVAMYELVKVGHDQLVGEVIRINGDQATIQVYEETAGVMVGDPVLRTGKPLSVELGPGLLNNIYDGIQRPLEKIAEASNSIYIPRGIATPALDRKKKWEFTPTMKVGDHIAGGDVWGTVYENSFISVHKILLPPRARGTITRIAEKGEYTVEEKILEVEFDGKKTEYPMMQTWPVRVPRPAAEKHSANQPFLVGQRVLDALFPSVQGGTVAIPGAFGCGKTVISQSVSKFSNSDVIVYVGCGERGNEMAEVLKDFPELSIEVDGRKEPIMKRTTLIANTSNMPVAAREASIYTGITVAEYFRDQGMNVAMMADSSSRWAEALREISGRLGEMPADQGFPAYLGAKLASFYERAGKVQALGSPPREGSVSIVGAVSPPGGDFSDPVTSATLGIVQVFWGLDKKLAQRKHFPSINTSVSYSKYLTILDKWYEREYPDFPRLRDRIRQLLSDSEELDQVVQLVGKSALSDPDKITLDMATLIKEDFLQQNGYSDYDQFCPIWKTEWMMKLMMGFHDEAQKAIAQGQNWNKVREATQDLQAQLKSLKFEVPSEGQEKICKKYEAIQQQMLDKFASVIDE

SEQ ID NO: 1363 - protein, 967 aa, Oryza sativa; identical to SEQ ID NO: 721

SEQ ID NO: 1364 - protein, 653 aa, Neurospora crassa
MDAKPQRPLWAPPVRYGDENIPPADPTHQSKRSDSKIKAMMAVNGTLNAPPKRAACFDKSNTSKPLADGGNKDMLKNRVKPMVTTSSTRDLRSDGRENNRSAAEEHYMRPTATSKAASHGHQKYSSTAPLSSHAASGAYGGIRSHNAIAKLSAPVKKTTNVYRDNKVKEESTSHAPTSSSVDDLVAMVDKHIKDPRHYKSQPQLKSDQQHTLHRNQSKYVPNYENLNDVDDPDDSNADYAESYEDAVEQLSRDLDIPANTDPAAIVHANHMSIAQASYDSMPQGAPLAPSKPVRALPLPPNVSDPEEYSEDDDDQDLYDDQGYTTAHSYRSHCDNTTGGPPTLVAPKFTADIQKELDIAKAWVLEHQTEEEVEEENWDVSMVAEYGDEIFEYLRELEERMLPNPHYMDIQTEIRWSMRSVLMDWLVQVHHRFSLLPETLFLTVNYIDRFLSVKVVSLGKLQLVGATAIFVAAKYEEINCPSIQELVYMVDQGYSVEEILKAEKFMLTMLNFELGWPGPMSFLRRISKADDYDLETRTLAKYLLEVTIMDERFVGCPASYLAAGAHCLSRFFLQRGPWTHAHVHFSGYTLAQLRPLIISILDCCQEPRKHHGAVYDKYSHQRFKSASTFVEGKIANGFVLPIRTNASISDSAQS

SEQ ID NO: 1365 - protein, 125 aa, Thermus thermophilus
MALDIERIKEELSQATVLELKQLIDALKEAWGVTAAAPVAVAAAPAAGAAAAPAEEKTEFDVILKEAGAKKLEVIKDVRAITGLGLKEAKDLAEKGGPVKEGVSKQEAEEIKKKLEAVGAVVELK

SEQ ID NO: 1366 - protein, 488 aa, Oryza sativa; identical to SEQ ID NO: 731

SEQ ID NO: 1367 - protein, 488 aa, Oryza sativa; identical to SEQ ID NO: 712

SEQ ID NO: 1368 - protein, 517 aa, Cuphea wrightii
MAAVSSPFCTWLVAACMSTSFDNDPRSLSNKRVRLSRRRRTLSSHCSLRGSTFQCLGDNVGFDSLFGSNHGHRRLGRASRSGEAMAVAMQPAPEVSTKKKPVTKQRRVVVTGMGVVTPLGHDPDVFYNNLLDGVSGISEIETFDCTQFPTRIAGEIKSFSTDGWVAPKLSKRMDKFMLYMLTAGKKALADAGITEDVMKELDKRKCGVLIGSGMGGMKLFNDSIEALRISYKKMNPFCVPFATTNMGSAMLAMDLGWMGPNYSISTACATSNFCILNAANHIIRGEADMMLCGGSDAAIIPIGLGGFVACRALSQRNNDPTKASRPWDSNRDGFVMGEGAGVLLLEELEHAKKRGATIYAEFLGGSFTCDAYHMTEPHPEGAGVILCIERALAQSGVSKEDVNYINAHATSTPAGDIKEYQALARIFSQNSELRVNSTKSMIGHLLGAAGGVEAVTVVQAIRTGWIHPNINLENPDDGVDAKLLVGPKKEKLKVKVGLSNSFGFGGHNSSILFAPCN

SEQ ID NO: 1369 - protein, 540 aa, Cuphea wrightii
MAAAASMVASPFCTWLVASCMSTSFDNDPRSPSVKRFPRRKRVLSQRGSTFQCLVASCIDPCDQYRSSASLSFLGDNGFASLFGSKPFMSNRGHRRLRRASHSGEAMAVALQPAQEAGTKKKPVIKQRRVVVTGMGVVTPLGHEPDVFYNNLLDGVSGISEIETFDCTQFPTRIAGEIKSFSTDGWVAPKLSKRMDKFMLYLLTAGKKALADGGITDEVMKELDKRKCGVLIGSGMGGMKVFNDAIEALRVSYKKMNPFCVPFATTNMGSAMLAMDLGWMGPNYSISTACATSNFCILNAANHIIRGEADMMLCGGSDAVIIPIGLGGFVACRALSQRNSDPTKASRPWDSNRDGFVMGEGAGVLLLEELEHAKKRGATIYAEFLGGSFTCDAYHMTEPHPEGAGVILCIEKALAQAGVSKEDVNYINAHATSTSAGDIKEYQALARCFGQNSELRVNSTKSMIGHLLGAAGGVEAVTVVQAIRTGWIHPNLNLEDPDKAVDAKLLVGPKKERLNVKVGLSNSFGFGGHNSSILFAPCNV

SEQ ID NO: 1370 - protein, 474 aa, Glycine max
MATSDSNMLLNYVPVYVMLPLGVVNVDNVFEDPDGLKEQLLQLRAAGVDGVMVDVWWGIIELKGPKQYDWRAYRSLFQLVQECGLTLQAIMSFHQCGGNVGDIVNIPIPQWVLDIGESNHDIFYTNRSGTRNKEYLTVGVDNEPIFHGRTAIEIYSDYMKSFRENMSDFLESGLIIDIEVGLGQQESSDTPSYPQSQGWEFPGIGEFQCYDKYLKADFKAAVARAGHPEWELPDDAGKYNDVPESTGFFKSNGTYVTEKGKFFLTWYSNKLLNHGDQILDEANKAFLGCKVKLAIKVSGIHWWYKVENHAAELTAGYYNLNDRDGYRPIARMLSRHHAILNFTCLEMRDSEQPSDAKSGPQELVQQVLSGGWREDIRVAGENALPRYDATAYNQIILNARPQGVNNNGPPKLSMFGVTYLRLSDDLLQKSNFNIFKKFVLKMHADQDYCANPQKYNHAITPLKPSAPKIPIEFF

SEQ ID NO: 1371 - protein, 324 aa, Ajellomyces capsulatus
MENYQKIEKIGEGTYGVVYKARDLTHPNRIVALKKIRLEAEDEGVPSTAIREISLLKEMHDPNIVRLLNIVHADGHKLYLVFEFLDLDLKKYMEALPVSEGGRGKALPDGSTLDMNRLGLGEAMVKKFMAQLVEGIRYCHSHRVLHRDLKPQNLLIDREGNLKLADFGLARAFGVPLRTYTHEVVTLWYRAPEILLGGRQYSTGVDMWSVGAIFAEMCTRKPLFPGDSEIDEIFKIFKLLGTPDENTWPGVTSFPDFKASFPKWKREDTRKLVPGLERNGLDLLDAMLEYDPARRISAKQACMHPYFQAGSSAYSGRERLQPYP

SEQ ID NO: 1372 - protein, 593 aa, Pisum sativum
METETETPNGSTPCPTSAPSAIPLRPSSCDGTMGRHLARRLVEIGVRDVFSVPGDFNLTLLDHLIAEPELNLVGCCNELNAGYAADGYGRAKGVGACVVTFTVGGLSILNAIAGAYSENLPVICIVGGPNSNDYGTNRILHHTIGLPDFSQELQCFQTITCFQAVVNNLDDAHELIDTAISTALKESKPVYISIGCNLPAIPHPTFARDPVPFFLAPRVSNQAGLEAAVEEAAAFLNKAVKPVIVGGPKLRVAKAQKAFMEFAEASGYPIAVMPSGKGLVPENHPHFIGTYWGAVSTSYCGEIVESADAYVFVGPIFNDYSSVGYSLLIKKEKSLIVQPNRVTIGNGLSLGWVFMADFLTALAKKVKTNTTAVENYRRIYVPPGIPLKREKDEPLRVNVLFKHIQALISGDTAVIAETGDSWFNCQKLRLPENCGYEFQMQYGSIGWSVGATLGYAQAATDKRVIACIGDGSFQVTAQDISTMIRCGQRSIIFLINNGGYTIEVEIHDGPYNVIKNWDYTGFVSAIHNGQGKCWTAKVRTEEDLTEAIATATGAEKDSLCFIEVFAHKDDTSKELLEWGSRVAAANSRPPNPQ

SEQ ID NO: 1373 - protein, 603 aa, Oryza sativa
METHIGSVDGAAAAADNGAVGCPASAVGCPMTSARPGVSARRGVAGTAPGEAAGAGGRQRRVRVPGDFNLTLLDHLIAEPGLLVGCCNELNAGYAADGYARSRGVGACAVTFTVGGLSVLNAIAGAYSENLPVICIAGGPNSNDYGTNRILHHTIGLPDFSQELRCFQTVTCTQAVVTNLEDAHEQIDTAIATALRESKPVYLSISCNLPGLPHPTFSRDPVPFFLAPRLSNKMGLEAAVEATVEFLNKAVKPVLVGGPKLRVAKAGKAFVDLVDASGYPYAVMPSAKGLVPETHPHFIGTYWGAVSTAFCAEIVESADAYLFAGPIFNDYSSVGYSFLLKKDKAIIVQPERVIVGNGPAFGCVMMKEFLSELAKRVNKNTTAYENYKRIFVLRASAGEEPNEPLRVNVLFKHVQKMLNSDSAVIAETGDSWFNCQKLKLPEGCGYEFQMQYGSIGWSVGALLGYAQGAKDKRVIACIGDGSFQVTAQDVSTMIRCAQNSIIFLINNGGYTIEVEIHDGPYNVIKNWNYTGLVDAIHNGEGKCWTSKVKCEEELTEAIGMALGEKKDCLCFIEVIAHKDDTSKELLEWGSRVSAANSRPPNPQ

SEQ ID NO: 1374 - protein, 405 aa, Pisum sativum
PVYISIGCNLPAIPHPTFSRDPVPFSLAPKLSNQMGLEAAVEAAAEFLNKAVKPVLVGGPKLRVAKASDAFVELADASGYALAVMPSAKGMVPEHHPHFIGTYWGAVSTAFCAEIVESADAYLFAGPIFNDYSSVGYSLLLKKEKAIIVMPDRVVIANGPAFGCVLMNDFLKALAKRLKHNNVAYENYHRIFVPDGTPLKSASKEPLRVNVMFQHIQKMLSSETAVIAETGDSWFNCQKLKLPEGCGYEFQMQYGSIGWSVGATLGYAQAVPEKRVIACIGDGSFQVTAQDVSTMLRCGQKTIIFLINNGGYTIEVEIHDGPYNVIKNWNYTGLVDAIHNGEGKCWTTKVFCEEELVEAIAKATGPKKDSLCFIEVIVHKDDTSKELLEWGSRVSAANSRPPNPQ

SEQ ID NO: 1375 - protein, 614 aa, Nicotiana tabacum
MDGSVAKGTSCIQDSQSSSVIANTDATLGRHLARRLVEIGIQDVFSVPGDFNLTLLDHLIAEPRLKNIGCCNELNAGYAADGYARARGVGACVVTFTVGGLSVLNAIAGAYSENLPVICIVGGPNTNDYGTNRILHHTIGLPDFSQELRCFQTVTCYQAVVNNLDDAHEQIDRAISTALKESKPVYISISCNLPAIPHPTFSRDPIPFSLSPRLSNKRGLEAAVDAAVTFLSKAVKPVMIGGPKLRVAKACDAFVELADSSGYAMAVMLQPKGLVAEQHPHFIGTYWGAVGTSYCAEIVESADAYLFAGPIFNDYSSVGYSLLIKKEKSIIVQPDRVVIGNGPAFGCVLMKDFLSELAKKIKKNETAYENYRRIFVPEGTPLKSEPNEPLRVNVLFQHIQKMLSDETAVIAETGDSWFNCQKLKLPEGCGYVTNNSLSAWYPFYLQTLEEKSSCCRYEFQMQYGSIGWSVGATLGYAQSVPKKRVISCIGDGSFQVTAQDVSTMIRCEQKNIIFLINNGGYTIEVEIHDGPYNVIKNWNYTGLVDAIHNGEGNCWTMKVRTEEELTEAIATATGEKKDCLCFIEVIVHKDDTSKELLEWGSRVCSANGRPPNPQ

SEQ ID NO: 1376 - protein, 477 aa, Arabidopsis thaliana
MADPATSSPLLDDHVGGEDERGRRSRSSTLVQKVIDVEEAKAQMIYSLPMILTNVFYYCIPITSVMFASHLGQLELAGATLANSWATVSGFAFMVGLSGSLETLCGQGFGAKRYRMLGVHLQSSCIVSLVFSILITIFWFFTESIFGLLRQDPSISKQAALYMKYQAPGLLAYGFLQNILRFCQTQSIIAPLVIFSFVPLVINIATAYVLVYVAGLGFIGAPIATSISLWIAFLSLGTYVMCSEKFKETWTGFSLESFRYIVINLTLSLPSAAMVCLEYWAFEILVFLAGVMPNPEINTSLVAICVNTEAISYMLTYGLSAAASTRVSNELGAGNVKGAKKATSVSVKLSLVLALGVVIVLLVGHDGWVGLFSDSYVIKEEFASLRFFLAASITLDSIQGVLSGVARGCGWQRLVTVINLATFYLIGMPIAAFCGFKLKFYAKGLWIGLICGIFCQSSSLLLMTIFRKWTKLNVATV

SEQ ID NO: 1377 - protein, 1108 aa, Arabidopsis thaliana
MSPAAVEIGSPVEKVSSVLNPMENFSAFFPESVHSHDQRTMGSSFSFGFGAGSGQTTKTRHKPRLVKLRKNGREVKKPSFSGEILSGFNPFAPPGKGSLHMNSGNDRDAGQSPGDKCFVFGASGNSSGAKSSPGNATIASLSDEEEFSTPIGDSELDSESIKEHSNGVRGKVDNDRENIRPCSESTIFDATNGFRFDGGVNGSWKSVENPDAVKEFFRRQNGMDKASASKSCSKSNSVQYAHGKNRDDPELNLLADMEKLNISDSRVHGGSDYEEASKSNKTPVFTFSSFGKVDPICKEGAATSEPYSFSSNGFQQSNNASGENPTFHSQTTYGNNLTNTSFATKTFFDDFKVPEWDPSLLKDSLFPEVDRNPVHARSNRSSKDKRSKKVKEKMKQGEPDRCNGQTAEGIEAQEKLNSPGYCSPMDYSPYQGDKTSNQFPTETPLAPSHSREHIDSRSSNDFKVASARDSSLFTAEDHGSTCIPNFSFSASTSQETIRHKKLQAVKKYRRKVNNSLPKSNLNATMRNNQENQPVNTGQAKQDSGSTSMMPDVCEVWRLRGNQAYKNGYMSKAEECYTHGINSSPSKDNSEYSVKPLALCYGNRAAARISLGRLREAISDCEMAASLDPSYIKAYMRAANCHLVLGELGSAVQYFNKCMKSTSSVCLDRRTTIEAAEGLQQAQRVADFTSCASIFLEKRTPDGASDALVPIANALSISSCSDKLLQMKAEALFMIRRYKEVIELCENTLQTAERNFVSAGIGGTTNVNGLGSTYHSLIVWRWNKISKSHFYLGNLEKALDILEKLQQVEYTCNENQEECRESPASLVATISELLRYKNAGNEAVWDRKYMEAVEQYTAALSRNVDSRPFAAICFCNRAAANQALVQIADAIADCSLAMALDENYTKAVSRRATLHEMIRDYDQAASDLQRLISILVKQSDKTKTPETSVDRASSRKELKQARQRLSVMEEKSKEGIHLDFFLIMGVKTSDSAADIKKAYRKAALRHHPDKAAQILVRSESEGPWLKEILEEVHKGADRLFKMIGEAYSVLSDPTKRSDYELEEEIRKARASRESYRSRKAAEASSPPYQTSRRYWKDSWRTNQNTPSWW

SEQ ID NO: 1378 - protein, 415 aa, Vibrio harveyi
MSKRRVVVTGMGMLSPVGNTVESSWKALLEGQSGIVNIEHFDATNFSTRFAGLVKDFDCTEYMSKKDARKMDLFIQYGIAAGIQALDDSGLEITEENAARVGVAIGSGIGGLDLIEAGHSALVEKGPRKVSPFFVPSTIVNMVAGNLSIMRGLRGPNIAISTACTTGLHNIGHAARMIAYGDAEAMVAGGAEKASTPLGMAGFGAAKALSTRNDEPQKASRPWDKGRDGFVLGDGAGVMVLEEYEHAKARGAKIYAELVGFGMSGDAYHMTSPSEDGSGGALAMEAAMRDANITGTQVGYVNAHGTSTPAGDVAEIKGVKRALGEEGSKQVLVSSTKSMTGHLLGAAGSVEAIITVLSLVDQIVPPTINLDDPEEGLDIDLVPHTARKVDMEYAICNSFGFGGTNGSLVFKKIAE

SEQ ID NO: 1379 - protein, 553 aa, Oryza sativa
MYRVKSESDCEMIHQEQMDSPVADDGSSGGSPHRGGGPPLKKGPWTSAEDAILVDYVKKHGEGNWNAVQKNTGLFRCGKSCRLRWANHLRPNLKKGAFTAEEERLIIQLHSKMGNKWARMAAHLPGRTDNEIKNYWNTRIKRCQRAGLPIYPTSVCNQSSNEDQQCSSDFDCGENLSNDLLNANGLYLPDFTCDNFIANSEALPYAPHLSAVSISNLLGQSFASKSCSFMDQVNQTGMLKQSDGVLPGLSDTINGVISSVDQFSNDSEKLKQAVGFDYLHEANSTSKIIAPFGGALNGSHAFLNGNFSASRPTSGPLKMELPSLQDTESDPNSWLKYTVAPALQPTELVDPYLQSPAATPSVKSECASPRNSGLLEELIHEAQTLRSGKNQQTSVISSSSSVGTPCNTTVLSPEFDMCQEYWEEQHPGPFLNDCAPFSGNSFTESTPPVSAASPDIFQLSKVSPAQSTSMGSGEQVMGPKYEPGDTSPHPENFRPDALFSGNTADPSVFNNAIAMLLGNDLSIDCRPVLGDGIMFNSSSWSNMPHACEMSEFK

SEQ ID NO: 1380 - protein, 1088 aa, Candida tropicalis
MAGALENARKEIKRLSLDDTNESQYGQIYSVSGPVVIAENMIGCAMYELVKVGHDNLVGEVIRINGDKATIQVYEETAGVTVGDPVLRTGKPLSVELGPGLMETIYDGIQRPLKAIKDESQSIYIPRGIDVPALSRTVQYDFTPGQLKVGDHITGGDIFGSIYENSLLDDHKILLPPRARGTITSIAEAGSYNVEEPVLEVEFDGKKHKYSMMHTWPVRVPRPVAEKLTADHPLLTGQRVLDSLFPCVQGGTTCIPGAFGCGKTVISQSLSKFSNSDVIIYVGCFTKGTQVMMADGADKSIESIEVGDKVMGKDGMPREVVGLPRGYDDMYKVRQLSSTRRNAKSEGLMDFTVSADHKLILKTKQDVKIATRKIGGNTYTGVTFYVLEKTKTGIELVKAKTKVFGHHIHGQNGAEEKAATFAAGIDSKEYIDWIIEARDYVQVDEIVKTSTTQMINPVHFESGKLGNWLHEHKQNKSLAPQLGYLLGTWAGIGNVKSSAFTMNSKDDVKLATRIMNYSSKLGMTCSSTESGELNVAENEEEFFNNLGAEKDEAGDFTFDEFTDAMDELTINVHGAAASKKNNLLWNALKSLGFRAKSTDIVKSIPQHIAVDDIVVRESLIAGLVDAAGNVETKSNGSIEAVVRTSFRHVARGLVKIAHSLGIESSINIKDTHIDAAGVRQEFACIVNLTGAPLAGVLSKCALARNQTPVVKFTRDPVLFNFDLIKSAKENYYGITLAEETDHQFLLSNMALVHNCGERGNEMAEVLMEFPELFTEISGRKEPIMKRTTLVANTSNMPVAAREASIYTGITLAEYFRDQGKNVSMIADSSSRWAEALREISGRLGEMPADQGFPAYLGAKLASFYERAGKATALGSPDRVGSVSIVAAVSPAGGDFSDPVTTSTLGITQVFWGLDKKLAQRKHFPSINTSVSYSKYTNVLNKYYDSNYPEFPQLRDKIREILSNAEELEQVVQLVGKSALSDSDKITLDVATLIKEDFLQQNGYSSYDAFCPIWKTFDMMRAFISYYDEAQKAIANGAQWSKLAESTSDVKHAVSSAKFFEPSRGQKEGEKEFGDLLTTISERFAEASE

SEQ ID NO: 1381 - protein, 476 aa, Nostoc sp.
MRRTKIICTVGPATSAPERLEALVEAGMNVARLNFSHGAYDFHAQTAQYLRQISADRQKPVAIMQDLCGPKIRLGTLPPEGLMVEAGQEVTFVLQEKGSSLDELPLPLPTLFAMVRPGEPILINDGRVKLIVTDRDADRIRAIAKIGGLLSTRKGVNLPATRLPVSSITEKDLQDLRFGIDLSVDWVAVSFVRSPYDLEPAQRMIEAAGKTIRVIAKIERPEAVEQIDSIIDVADAIMIARGDLGVEMPIHEVPLIQKDIIRRCNQAGKPVITATQMLESMISAPDPTRAEATDVANSILDGTDAVMLSGETAVGQYPVAAVQVMHDIAVTTEKSLQEGSKHCLSHEAGGLSVTESVAEAVCRIAYETGAKAILCNTTSGSTAKLVSKYRPTTPIFALTPDETAYHQLALSWGVEPLLTPPVHNAEEMFMNLINTAVRTGLVHDGDKVVITSGVPIGKSGTTSLIKVHSIGQPITA

SEQ ID NO: 1382 - protein, 589 aa, Nostoc sp.
MQLRDSVRRTKIVATIGPATSSPEMLKAIIEAGATTLRLNFSHGSHADHQRSIRLIRQTAFELNQPVAILQDLQGPKIRLGKFENGSIVLAKGDRFTLTNRPVVGSQEISCVTYDYLADEVPVGAKILLDDGRVEMVVEDINRDKGDLNCRVTVAGKLSNNKGVNFPGVYLSIKAMTDKDREDLMFGLDQGVDWVALSFVRNPQDIIEIKELISSTGKQVPVVAKIEKHEAIEQMEAVLALCDGVMVARGDLGVELPAEDVPVLQKRLIATANRLGIPIITATQMLDSMVSNPRPTRAEVSDVANAILDGTDAVMLSNETAVGSYPVEAVATMARIAERIEQEEAMASKLRQMRDNRRSIPNAISQAVGQIAEQLGAAAIMTLTQTGATARNVSKFRPQTPILAVTPHVNVARQLQMVWGVKPLLVLELPSTGQTFQAAINVAQEHSLLFEGDLVVMTAGTLQGVSGSTDLIKVEVVTAVLGQGIGLGQGLVSGCARVAHTGMDVGNFNAGDILVAPRTGADFVEAIRKAGGIITEDESLTSHAAVIGLRLGVPVIVGVKKATQVIRDGAILTLDLQRGLVYSGAVGTP

SEQ ID NO: 1383 - protein, 655 aa, Saccharomyces cerevisiae
MLAAKNILNRSSLSSSFRIATRLQSTKVQGSVIGIDLGTTNSAVAIMEGKVPKIIENAEGSRTTPSVVAFTKEGERLVGIPAKRQAVVNPENTLFATKRLIGRRFEDAEVQRDIKQVPYKIVKHSNGDAWVEARGQTYSPAQIGGFVLNKMKETAEAYLGKPVKNAVVTVPAYFNDSQRQATKDAGQIVGLNVLRVVNEPTAAALAYGLEKSDSKVVAVFDLGGGTFDISILDIDNGVFEVKSTNGDTHLGGEDFDIYLLREIVSRFKTETGIDLENDRMAIQRIREAAEKAKIELSSTVSTEINLPFITADASGPKHINMKFSRAQFETLTAPLVKRTVDPVKKALKDAGLSTSDISEVLLVGGMSRMPKVVETVKSLFGKDPSKAVNPDEAVAIGAAVQGAVLSGEVTDVLLLDVTPLSLGIETLGGVFTRLIPRNTTIPTKKSQIFSTAAAGQTSVEIRVFQGERELVRDNKLIGNFTLAGIPPAPKGVPQIEVTFDIDADGIINVSARDKATNKDSSITVAGSSGLSENEIEQMVNDAEKFKSQDEARKQAIETANKADQLANDTENSLKEFEGKVDKAEAQKVRDQITSLKELVARVQGGEEVNAEELKTKTEELQTSSMKLFEQLYKNDSNNNNNNNNGNNAESDETKQ

SEQ ID NO: 1384 - protein, 569 aa, Brassica napus
MAFNLTHQLGALAGTPIKSGEMTAPSAESSLSVSPPSARMPISMNMNYTSNRNVSPPMSPVLGSRRADLSVACKAFAVETVEEQRTYKEGGIGGEKGKGGVPVFVMIPLDSVTIGNTVNRRKAMRASLQALKSAGVEGIMIDVWWGLVEREAPGAYNWGGYNELLEMAKKVGLKVQAVMSFHQCGGNVGDSVTIPLPQWVVEEVDKDPDLAYTDQWGRRNHEHISLGADTLPVLKGRTPVQCYSDFMRAFRDNFKHLLGDTIVEIQVGMGPAGELRYPSYPEQDGHEVPRDWSLPVLRQDSLSSLKAAAEAYGKPEWGGTGPTDAGHYNNWPEDTQFFKKEDGGWNTEYGDFFLTWYSQMLLDHGERILSSAKSIFQDTGVKISVKVAGIHWHYGTRSHAPELTAGYYNTRFRDGYLPIAQMLARHNAIFNFTCIEMRDHEQPQDALCAPEKLVNQVALATLAAEVPLAGENALPRYEDYAHEQILKASALSFDQNSEGENREMCAFTYLRMNPELFKADNWGKFVGFVKKMGEGRDSDRCREEVEREAEHFVHVTQPLVQEAAVALTH

SEQ ID NO: 1385 - protein, 605 aa, Fragaria x
MDTKIGSIDVCKTENHDVGCLPNSTTSTVQDSVPSTCLSSADATLGRHLARRLVQIGITDVFTVPGDFNLTLLDHLIAEPGLTNIGCCNELNAGYAADGYARSRGVGACVVTFTVGGLSVLNAIAGAYSENLPVICIVGGPNSNDYGTNRILHHTIGSPDFSQELRCFQTVTCFQAVVNNLEDAHELIDTAISTALKESKPVYISIGCNLAGIPHPTFSREPVPFSLSPKLSNKWGLEAAVEAAAEFLNKAVKPVMVGGPKLRSAHAGDAFVKLADASGFALAVMPSAKGQVPEHHPHFIGTYWGAVSTAFCAEIVESADAYLFAGPIFNDYSSVGYSLLLKKEKAIIVQPDRVTIGNGPTFGCVLMKDFLVGLAKKLKHNNTAYENYRRIFVPDGHPLKAAPKEPLRVNVLFKHIQKMLSAETAVIAETGDSWFNCQKLKLPPGCGYEFQMQYGSIGWSVGATLGYAQAVPEKRVIAFIGDGSFQVTAQDVSTMIRNGQRTIIFLINNGGYTIEVEIHDGPYNVIKNWNYTGLVDAIHNGEGKCWTTKVRCEEELIEAIETANGPKKDRLCFIEVIVHKDDTSKELLEWGSRVSAANSRPPNPQ

SEQ ID NO: 1386 - protein, 130 aa, Nostoc sp.
MSAATDQILDQLKSLSLLEAAELVKQIEEAFGVSAAAPAGGMMMMAAPGAAAAAEPVEEQTEFDVVLESVPADKKIAVLKIVREITGLGLKEAKDLVEAAPKAVKEAIAKDAAEDAKKRIEEAGGKVTVK

SEQ ID NO: 1387 - protein, 1022 aa, Saccharomyces cerevisiae
MIKVDCNNQELSNNKQERSSSVTSASSHYIGLPQEAQINGEPLQRANVGSPATGVNYHNEMEMLSSEQFLEELTANATHAANSGIPPANNPVSSGSTAQRPSVEEFFSAPSARVCSPSQEASASSISASRSSAHHNDLSSSLMKNPNLSFDSHPPRVRSSSKSAVITPVSKSVPDVDPAVVDVAKVREEFQQQASLPSMKRVSGSTAGDSSIASSSSNLRYSQQFQDNFIEDTDSEDDIDSDLETDATKKYNVPKFGGYSNNAKLRASLMRNSYELFKHLPWTIVDSDKGNGSLKNAVNIAVAEKTVKEPVSWVGTMGIPTDELPHEVCHKISKKLEQDFSSFPVVTDDITFKGAYKNYAKQILWPTLHYQIPDNPNSKAFEDHSWDYYQKVNQKFSDRIVSVYKPGDTIWIHDYHLMLVPQMVREKLPKAKIGFFLHVSFPSSEVFRCLANRERILEGIIGANFVGFQTKEYKRHFLQTCNRLLAADVSNDEVKYHCNIVSVMYAPIGIDYYHLTSQLRNGSVLEWRQLIKERWRNKKLIVCRDQFDRIRGLQKKMLAYERFLIENPEYIEKVVLIQICIGKSSDPEYERQIMVVVDRINSLSSNISISQPVVFLHQDLDFAQYLALNCEADVFLVDALREGMNLTCHEFIVSSFEKNAPLLLSEFTGSSSVLKEGAILINPWDINHVAQSIKRSLEMSPEEKRRRWKKLFKSVIEHDSDNWITKCFEYINNAWESNQETSTVFNLAPEKFCADYKASKKHLFIFKISEPPTSRMLSLLSELSSNNIVYVLSSFTKNTFESLYNGVLNIGLIAENGAYVRVNGSWYNIVEELDWMKEVAKIFDEKVERLPGSYYKIADSMIRFHTENADDQDRVPTVIGEAITHINTLFDDRDIHAYVHKDIVFVQQTGLALAAAEFLMKFYNSGVSPTDNSRISLSRTSSSMSVGNNKKHFQNQVDFVCVSGSTSPIIEPLFKLVKQEVEKNNLKFGYTILYGSSRSTYAKEHINGVNELFTILHDLTAA

SEQ ID NO: 1388 - protein, 509 aa, Schizosaccharomyces pombe
MSSSAVSPKQWVAGLNSELDIPAVNRRTSIICTIGPKSNNVETLCKLRDAGMNIVRMNFSHGSYEYHQSVIDNARKASATNPLFPLAIALDTKGPEIRTGLTVGGTDYPISSGHEMIFTTDDAYAEKCNDKVMYIDYKNITKVIQPGRIIYVDDGILSFTVIEKVDDKNLKVRVNNNGKISSKKGVNLPKTDVDLPALSEKDKADLRFGVKNGVDMIFASFIRRAEDVIHIREVLGEEGKNIKIICKIENQQGVNNFDSILDVTDGIMVARGDLGIEIPASQVFVAQKMMIAKCNIAGKPVACATQMLESMTYNPRPTRAEVSDVGNAVLDGADLVMLSGETTKGSYPVEAVTYMAETARVAEASIPYGSLYQEMFGLVRRPLECATETTAVAAIGASIESDAKAIVVLSTSGNTARLCSKYRPSIPIVMVTRCPQRARQSHLNRGVYPVIYEKEPLSDWQKDVDARVAYGCQQAYKMNILKKGDKIIVLQGAVGGKGHTSIFRLTVAE

SEQ ID NO: 1389 - protein, 1054 aa, Saccharomyces cerevisiae
MTIIVASLFLPYTPQFEADVTNSDTAKLVESSMIKVDCNNQELSNNKQERSSSVTSASSHYIGLPQEAQINGEPLQRANVGSPATGVNYHNEMEMLSSEQFLEELTANATHAANSGIPPANNPVSSGSTAQRPSVEEFFSAPSARVCSPSQEASASSISASRSSAHHNDLSSSLMKNPNLSFDSHLPRVRSSSKSAVITPVSKSVPDVDPAVVDVAKVREEFQQQASLPSMKRVSGSTAGDSSIASSSSNLRYSQQFQDNFIEDTDSEDDIDSDLETDATKKYNVPKFGGYSNNAKLRASLMRNSYELFKHLPWTIVDSDKGNGSLKNAVNIAVAEKTVKEPVSWVGTMGIPTDELPHEVCHKISKKLEQDFSSFPVVTDDITFKGAYKNYAKQILWPTLHYQIPDNPNSKAFEDHSWDYYQKVNQKFSDRIVSVYKPGDTIWIHDYHLMLVPQMVREKLPKAKIGFFLHVSFPSSEVFRCLANRERILEGIIGANFVGFQTKEYKRHFLQTCNRLLAADVSNDEVKYHCNIVSVMYAPIGIDYYHLTSQLRNGSVLEWRQLIKERWRNKKLIVCRDQFDRIRGLQKKMLAYERFLIENPEYIEKVVLIQICIGKSSDPEYERQIMVVVDRINSLSSNISISQPVVFLHQDLDFAQYLALNCEADVFLVDALREGMNLTCHEFIVSSFEKNAPLLLSEFTGSSSVLKEGAILINPWDINHVAQSIKRSLEMSPEEKRRRWKKLFKSVIEHDSDNWITKCFEYINDAWESNQETSTVFNLAPEKFCADYKASKKHLFIFKISEPPTSRMLSLLSELSSNNIVYVLSSFTKNTFEGLYNGVLNIGLIAENGAYVRVNGSWYNIVEELDWMKEVAKIFDEKVERLPGSYYKIADSMIRFHTENAEDQDRVPTVIGEAITHINTLFDDRDIHAYVHKDIVFVQQTGLALAAAEFLMKFYNSGVSPTDNSRISLSRTSSSMSVGNNKKHFQNQVDFVCVSGSTSPIIEPLFKLVKQEVEKNNLKFGYTILYGSSRSTYAKEHINGVNELFTILHDLTAA

SEQ ID NO: 1390 - protein, 641 aa, Schizosaccharomyces pombe
MTARWNSNASGNEKVKGPVIGIDLGTTTSCLAIMEGQTPKVIANAEGTRTTPSVVAFTKDGERLVGVSAKRQAVINPENTFFATKRLIGRRFKEPEVQRDIKEVPYKIVEHSNGDAWLEARGKTYSPSQIGGFILSKMRETASTYLGKDVKNAVVTVPAYFNDSQRQATKAAGAIAGLNVLRVVNEPTAAALAYGLDKKNDAIVAVFDLGGGTFDISILELNNGVFEVRSTNGDTHLGGEDFDVALVRHIVETFKKNEGLDLSKDRLAVQRIREAAEKAKCELSSLSKTDISLPFITADATGPKHINMEISRAQFEKLVDPLVRRTIDPCKRALKDANLQTSEINEVILVGGMTRMPRVVETVKSIFKREPAKSVNPDEAVAIGAAIQGGVLSGHVKDLVLLDVTPLSLGIETLGGVFTRLINRNTTIPTRKSQVFSTAADGQTAVEIRVFQGERELVRDNKLIGNFQLTGIAPAPKGQPQIEVSFDVDADGIINVSARDKATNKDSSITVAGSSGLTDSEIEAMVADAEKYRASDMARKEAIENGNRAESVCTDIESNLDIHKDKLDQQAVEDLRSKITDLRETVAKVNAGDEGITSEDMKKKIDEIQQLSLKVFESVYKNQNQGNESSGDNSAPEGDKK

SEQ ID NO: 1391 - protein, 476 aa, Escherichia coli
MTMSRLVVVSNRIAPPDEHAASAGGLAVGILGALKAAGGLWFGWSGETGNEDQPLKKVKKGNITWASFNLSEQDLDEYYNQFSNAVLWPAFHYRLDLVQFQRPAWDGYLRVNALLADKLLPLLQDDDIIWIHDYHLLPFAHELRKRGVNNRIGFFLHIPFPTPEIFNALPTYDTLLEQLCDYDLLGFQTENDRLAFLDCLSNLTRVTTRSAKSHTAWGKAFRTEVYPIGIEPKEIAKQAAGPLPPKLAQLKAELKNVQNIFSVERLDYSKGLPERFLAYEALLEKYPQHHGKIRYTQIAPTSRGDVQAYQDIRHQLENEAGRINGKYGQLGWTPLYYLNQHFDRKLLMKIFRYSDVGLVTPLRDGMNLVAKEYVAAQDPANPGVLVLSQFAGAANELTSALIVNPYDRDEVAAALDRALTMSLAERISRHAEMLDVIVKNDINHWQECFISDLKQIVPRSAESQQRDKVATFPKLA

SEQ ID NO: 1392 - protein, 349 aa, Sinorhizobium meliloti
MSGATLEAYLASCTARGDDLSRDVAAVIQRLAKAALDIRKLVNQGALGTAFNGTHGGSNTDGDLQKDLDILCDDQFLTCLQGAPVACYASEELENPVLLDPSARLAVAIDPLDGSSNIDNNVSIGTIFSVLPAAKGPDVDPSQSFLQPGNRQLAAGFFIYGPQTALVLSLGKGTEIFIFSSRLGCFVEAYKSAIIPERAHEFAINMSNYRHWEEAIRLYVDDCLAGSEGPRERDFNMRWIASLVAETYRILIRGGIFLYPADGRKGYSQGRLRLVYEANPIAFIIENAGGAATTSIDRILDLVPENLHQRVPLVFGSRREVARITRYHVDPNMIGERAPLFGKRGLFRA

SEQ ID NO: 1393 - protein, 641 aa, Sinorhizobium meliloti
MAKVIGIDLGTTNSCVSVMDGKDAKVIENAEGARTTPSMVAFTEDGERLVGQPAKRQAVTNPENTLFAIKRLIGRTFEDPTTQKDKGMVPYKIVKADNGDAWVEAHGTSYSPSQISAMILQKMKETAESYLGEKVEKAVITVPAYFNDAQRQATKDAGKIAGLDVLRIINEPTAAALAYGLDKKEGKTIAVYDLGGGTFDISVLEIGDGVFEVKSTNGDTFLGGEDFDMRLVEYLASEFKKEQGIDLKNDKLALQRLKEAAEKAKIELSSSQQTEINLPFITADASGPKHLTMKLSRAKFESLVEDLIQKTIAPCKAALKDAGVSAAEIDEVVLVGGMTRMPKVQETVKQLFGKEPHKGVNPDEVVAMGAAIQAGVLQGDVKDVLLLDVTPLSLGIETLGGVFTRLIERNTTIPTKKSQVFSTADDNQSAVTIRVSQGEREMAADNKLLGQFDLVGIPPAPRGVPQIEVTFDIDANGIVQVSAKDKGTGKEHQIRIQASGGLSDAEIEKMVKDAEANAEADKKRREGVEAKNQAESLVHSSEKSLQEHGDKVSETDRKAIEDAIAALKSAVEVSEPDAEDIKAKTNTLMEVSMKLGQAIYEAQQTDAAHADAAADAKRSGDDVVDADYEEVKDEDDRKRSA

SEQ ID NO: 1394 - protein, 648 aa, Arabidopsis thaliana
MASTEALLPVTSLQDPLSESRSDQIPETRRRRPIKVHLAVYSGLLLIALYVTLIVTHDGSKAEIATESRPRMAGVSEKSNDGVWISSDDGKVEAFPWNNTILSWQRTAFHFQPEKNWMNDPNGPLFYKGWYHFFYQYNPNAAVWGDIVWGHAVSKDLIHWLYLPIAMVPDQWYDANGVWTGSATFLDDGSIVMLYTGSTDEFVQVQNLAYPEDPSDPLLLKWVKFSGNPVLVPPPGIGAKDFRDPTTAWKTSSGKWRITIGSKINRTGISLIYDTTDFKTYEKHETLLHQVPNTGMWECVDFYPVSKTQLNGLDTSVNGPDVKHVIKASMDDTRIDHYAIGTYDDSNATWVPDNPSIDVGISTGLRYDYGKYYASKTFYDQNKGRRILWGWIGESDSEAADVQKGWSSVQGIPRTVVLDTRTHKNLVQWPVEEIKSLRLSSKKFDMTIGPGTVVPVDVGSATQLDIEAEFEIKTDDLKLFFDDDSVEADNKFSCETNGGSTARGALGPFGFSVLADEGLSEQTPVYFYVTKGKHSKLNTVFCTDTSRSTLANDVVKPIYGSFVPVLKGEKLTMRILVDHSIVEGFAQGGRSCITSRVYPTKAIYGATKLFLFNNAIDATVTASFTVWQMNNAFIHPYSSDDLGVPSST

SEQ ID NO: 1395 - protein, 462 aa, Arabidopsis thaliana
MVGSIEAKSLQSNGSVHHIGLNLEEKLDEFRRLLGKSEKDPLRIVSVGAGAWGSVFAALLQESYGGFRDKFQIRIWRRAGRAVDRETAEHLFEVINSREDILRRLIRRCAYLKYVEARLGDRTLYADEILKDGFCLNMVDTPLCPLKVVTNLQEAVWDADIVVNGLPSTETREVFEEISKYWKERITVPIIISLSKGIETALEPVPHIITPTKMIHQATGVPIDNVLYLGGPNIAAEIYNKEYANARICGAAKWRKPLAKFLRQPHFIVWDNSDLVTHEVMGGLKNVYAIGAGMVAALTNESATSKSVYFAHCTSEMIFITHLLAEEPEKLAGPLLADTYVTLLKGRNAWYGQMLAKGEINRDMGDSISGKGMIQGVSAVGAFYQLLSQSSLSILPSEEKKPVAPVESCPILKTLYKILITREQSTQAILQALRDETLNDPRDRIEIAQSHAFYRPSLLGQP

SEQ ID NO: 1396 - protein, 186 aa, Arabidopsis thaliana
MKLISLVRNVRSRQCQPEVIWSVQVRFLQQDSVSKAKPKKYKYPSVYDPYGPRPQPSSKIMELAERIAALSPEERKQIGPALNEHLRLPKQQMISSDGIGAKQDTGAGNVEEKKEKTAFDVKLEKFNASDKIKVIKEVRTFTSLGLKEAKELVEKVPAILKQGVTKEEANEIIAKIKAVGGIAVME

SEQ ID NO: 1397 - protein, 1010 aa, Arabidopsis thaliana
MRLFLLLAFNALMLLETHGFTDETDRQALLQFKSQVSEDKRVVLSSWNHSFPLCNWKGVTCGRKNKRVTHLELGRLQLGGVISPSIGNLSFLVSLDLYENFFGGTIPQEVGQLSRLEYLDMGINYLRGPIPLGLYNCSRLLNLRLDSNRLGGSVPSELGSLTNLVQLNLYGNNMRGKLPTSLGNLTLLEQLALSHNNLEGEIPSDVAQLTQIWSLQLVANNFSGVFPPALYNLSSLKLLGIGYNHFSGRLRPDLGILLPNLLSFNMGGNYFTGSIPTTLSNISTLERLGMNENNLTGSIPTFGNVPNLKLLFLHTNSLGSDSSRDLEFLTSLTNCTQLETLGIGRNRLGGDLPISIANLSAKLVTLDLGGTLISGSIPYDIGNLINLQKLILDQNMLSGPLPTSLGKLLNLRYLSLFSNRLSGGIPAFIGNMTMLETLDLSNNGFEGIVPTSLGNCSHLLELWIGDNKLNGTIPLEIMKIQQLLRLDMSGNSLIGSLPQDIGALQNLGTLSLGDNKLSGKLPQTLGNCLTMESLFLEGNLFYGDIPDLKGLVGVKEVDLSNNDLSGSIPEYFASFSKLEYLNLSFNNLEGKVPVKGIFENATTVSIVGNNDLCGGIMGFQLKPCLSQAPSVVKKHSSRLKKVVIGVSVGITLLLLLFMASVTLIWLRKRKKNKETNNPTPSTLEVLHEKISYGDLRNATNGFSSSNMVGSGSFGTVYKALLLTEKKVVAVKVLNMQRRGAMKSFMAECESLKDIRHRNLVKLLTACSSIDFQGNEFRALIYEFMPNGSLDMWLHPEEVEEIHRPSRTLTLLERLNIAIDVASVLDYLHVHCHEPIAHCDLKPSNVLLDDDLTAHVSDFGLARLLLKFDEESFFNQLSSAGVRGTIGYAAPEYGVGGQPSINGDVYSFGILLLEMFTGKRPTNELFGGNFTLNSYTKSALPERILDIVDESILHIGLRVGFPVVECLTMVFEVGLRCCEESPMNRLATSIVVKELVSIRERFFKASRTTWR

SEQ ID NO: 1398 - protein, 503 aa, Ralstonia solanacearum
MSPSPETLLQRLHLDTLTGGDGPLAARSPIDGAVLARLPVETAADADRIVAQAHAAFRNWRTVPAPRRGELVRLLGEELRAHKADLGALVTLEAGKITQEGLGEVQEMIDICDFAVGLSRQLYGLTIASERPAHRMMETWHPLGPCLVITAFNFPVAVWAWNATLALVCGDPVIWKPSEKTPLTALAVERLFLRACQRFGEAPPHLAQVAIGAHDLGEALARHPGVPLVSATGSTGMGRAVAQAAAPRFARTILELGGNNAAIVCTSADLALAERAIAFAAMGTAGQRCTSLRRLFVQRPVYDALVPRLTTLYARVQVGDPRDDGTLVGPLIDGHAYERMQAALARARAEGGTVHGGGRVTVGAGDGAYYVRPALVEMPAQDGVVCEETFAPILYVMPFDSLDEAIALNNAVPHGLSSSLFTLDMREAERFVSATGSDCGIANVNIGPSGAEIGGAFGGEKDTGGGREAGSDAWKAYMRRATNTVNYGTALPLAQGIRFEVGG

SEQ ID NO: 1399 - protein, 424 aa, Ralstonia solanacearum
MADKKGSTGEKLLYCSFCGKSQHEVKKLIAGPSVFICDECIDLCNEIIRDEAAISEKEGGLAVKSDLPTPHEIRQSLDQYVIGQEQAKKILAVAVYNHYKRLKHLGKKDDVELSKSNILLIGPTGSGKTLLAQTLARLLNVPFVIADATTLTEAGYVGEDVENIIQKLLQNCNYEVDKAQRGIVYIDEIDKISRKSDNPSITRDVSGEGVQQALLKLIEGTMASVPPQGGRKHPNQDFLQVDTTNILFICGGAFDGLEKIITQRSDKSGIGFGAEVKSKEERDVNEVLPQVEPEDLIKFGLIPELIGRLPVVATLAKLDEAALMEILVEPKNAIVKQYQKLLAMEGVELEIRPSALTAIARKAIKRKTGARGLRSIVEHALMDVMYDLPNHKGVQKVVIDESTIAGDGKPLLMYEEQPKVAGSN

SEQ ID NO: 1400 - protein, 338 aa, Ralstonia solanacearum
MKRINLTRYLIEEQREHNTIPAELRLLLEVVARACKAISHSVNKGALAGVLGSAGTGNVQGETQQKLDVIANEVLLEANEYGGNLAAMASEEMESFYEIPHRYPKGEYLLLFDPLDGSSNIDVNVSIGTIFSVLHMPKPGQTVTEADFMQPGVRQVAAGYAVYGPQTTLVLTVGNGVHMFTLDREVGSFILTNRDVKIPADTKEFAINMSNMRHWAPPVRRYIDECLAGTEGPRGKDFNMRWIASMVADVHRILTRGGIFMYPWDKREPGKAGKLRLMYEANPMAFLVEQAGGAATNGHQRILEIQPEKLHQRVAVILGSKNEVDRVTQYHREAQQTA

SEQ ID NO: 1401 - protein, 688 aa, Ralstonia solanacearum
MLNFSKIDLEKAGRHSHIRAKFVFSAVLRPDSRSKNMGKIIGIDLGTTNSCVSIMEGNTPKVIENAEGARTTPSIIAYMEDGEILVGAPAKRQAVTNPRNTLYAVKRLIGRKFEEKEVQKDIGLMPYTISKADNGDAWVEVRDKKMAPPQISAEVLRKMKKTAEDYLGEEVTEAVITVPAYFNDSQRQATKDAGRIAGLDVKRIINEPTAAALAFGLDKNEKGDRKIAVYDLGGGTFDISIIEIADVDGEKQFEVLSTNGDTFLGGEDFDQRIIDYIIGEFKKESGVDLSKDVLALQRLKDAAEKAKIELSSTQQTEINLPYITADASGPKHLNLKITRAKLEALVEDLIARTIEPCRTAIKDAGVKVSDIHDVILVGGMTRMPKVQEKVKEFFGKEARKDVNPDEAVAVGAAIQGQVLGGDRKDVLLLDVTPLSLGIETLGGVMTKMIGKNTTIPTKFSQTFSTADDNQPAVTIKVYQGEREMASGNKMLGEFNLEGIPPAPRGTPQIEVSFDIDANGILHVGAKDKATGKENKITIKASSGLSEAEIERMVKDAEANAEEDKKLRELVDSRNQGEALVHSTRKALGEYGDKLEAGEKDKIEAAIKDLEDVLKGSDKAAIDAKVEALATASQKLGEKVYADMQAKGGAEAGAEQAAAGAHAGAQAGHGAPQDDNVVDAEFKEVNDKK

SEQ ID NO: 1402 - protein, 680 aa, Ralstonia solanacearum
MPKQKHSSARHAGRQAPHRPQSPARRAFVMWSGASAGAALLGTLPGCGGDGGSSATAATASPADATATVTTRDAIWGESGAATRIVASLQGVAQSMFPRRDFVVTDYGAQPCAIVDAVNPYTDASKSPLSAGADKTPATGAFDARAAFTAAIAACNAAGGGRVLVPAGNWYCAGPIVLLSNVNFHLSADCTIYFSPNPDDYAKDGPVDCGANGKLYYSRWQSNDCLNYGAPVYARNQRNIALTGEGDSSTLNGQAMTPFAGSGNTSTCWWTFKGTKGEYGAVNASTPSQAYSNPNNVDLRTAAPGIADDLYARLTDPTTPWQQDQNYLSALSEAGVAVAQRIFGKGHYLRPCMVEFIGCTNVLMEAYRTHATPCWQHHPTDCANVVIRGVTVDSIGPNNDGFDPDACSNVLCEDMTFNTGDDCIAIKSGKNLDTGYGPAQDHVIRNCIMNSGHGGITLGSEMGGGVQRIYARNLTMRNAFYATDPLNIAIRIKTNMNRGGYVRDFYVDDVTLPNGVSLTGGGYGSGLLAGSPINSSVPLGVATAASANPSASRGGLITFDCDYQPSKDAIRTRPAQVQNIHISNVRASNATVGGTTGSCFQAIVAQGPVAFDYNGPTPAPTVPPIAGVTITDCDFGSPVAAGPASASTPGPIYAYNVSDITLTNVRIGAQIYNTTVSDTR

SEQ ID NO: 1403 - protein, 504 aa, Ralstonia solanacearum
MRVSELLSSLSIDGAASVEGGHQVRSPIDGTLIGSVKLVSAKESEAAIERAHAAFLQWRGVPAPVRGELVRLLGVELRRHKEALGRLVTLEAGKLLSEGLGEVQEMIDICDFAVGLSRQLYGLTIASERPGHRMMETWHPVGVVGVISAFNFPAAVWAWNSALAFVCGDSVVWKPSEKTPLTALACDALFRKAVAAFGKAHQGTAPDGLHALIVGGREAGEALVQSKRVPVVSATGSTRMGRLVSARVGERLGRAILELGGNNAMIVAPSADLELATRAITFAAVGTAGQRCTTLRRLIVHESVAANLVERLKRIYGSVTVGNPLQEGTLVGPLIDAGAYAAMARALERADAQGGRVHGGERTHLEAGPEAYYVKPALVEMPAQTEVMQQETFAPILYVLTYRTLDEAIALQNGVPQGLSSAIFTRDLNEAEWFLSAAGSDCGIANVNIGTSGAEIGGAFGGEKETGGGRESGSDAWKAYMRRATNTINYSNRLPLAQGVRFDV

SEQ ID NO: 1404 - protein, 313 aa, Schizosaccharomyces pombe
ERRKMIERESYKQVTTHTMQSWTSSLIRSLANKLAATKTDQRIPTLTPEHALSVYSKASKRLFMMDYDGTLTPIVRDPNAAVPSKKLLDNLATLAADPKNQVWIISGRDQQFLRNWMDDIKGLGLSAEHGSFVRKPHSTTWINLAELLDMSWKKEVRRIFQYYTDRTQGSSIEEKRCAMTWHYRKADPENGAFQALECEALLEELVCSKYDVEIMRGKANLEVRPSSINKGGIVKQILSSYPEDSLPSFIFCAGDDRTDEDMFRSLHKNTRINKETSFAVTIGSDKKLSIADWCIADPANVIDILADLANFTN

SEQ ID NO: 1405 - protein, 605 aa, Schizosaccharomyces pombe
MTKDAESTMTVGTYLAQRLVEIGIKNHFVVPGDYNLRLLDFLEYYPGLSEIGCCNELNCAFAAEGYARSNGIACAVVTYSVGALTAFDGIGGAYAENLPVILVSGSPNTNDLSSGHLLHHTLGTHDFEYQMEIAKKLTCAAVAIKRAEDAPVMIDHAIRQAILQHKPVYIEIPTNMANQPCAVPGPISAVISPEISDKESLEKATDIAAELISKKEKPILLAGPKLRAAGAESAFVKLAEALNCAAFIMPAAKGFYSEEHKNYAGVYWGEVSSSETTKAVYESSDLVIGAGVLFNDYSTVGWRAAPNPNILLNSDYTSVSIPGYVFSRVYMAEFLELLAKKVSKKPTTLEAYNKGRPQTVVSKAAEPKAALNRVEVMRQIQGLVDSNTTLYAETGDSWFNGLQMKLPAGAKFEVEMQWGHIGWSVPSAMGYAVAAPERRTIVMVGDGSFQLTGQEISQMIRHKLPVLIFLLNNRGYTIEIQIHDGPYNRIQNWDFAAFCESLNGETGKTKGLHAKTGEELTSAIKVALQNKEGSTLIECPIDEAACIQEWIAGYRTFTPRKIQLTFLDTQACMAAGLLSASEGTPYSESYFLSASEGICPYSESY

SEQ ID NO: 1406 - protein, 339 aa, uncultured cyanobacterium
MAQSTTSETHTRDLDRDCTTLSRHVLEQFQSFSPEAQDLAALMQRIGLAAKLIARRLSHAGLVDDALGFTGEINVQGEASKRMDVYANQVFISVFRQSGLVCRLASEEMEKPYYIPENCPIGRYTLLYDPLDGSANVDVDLNVGSIFAVRRQEFYDESHEAKDLLQPGDRQIAAGYVLYGASTLLVYSMGQGVHVFVLDPSLGEFVLAQSDIQLPNSGQIYSVNEGNFCSGPKVSPVHPGNASPRRLQRRYSGALVADFHRILMQGGVFLYPETVKNPTGKLRLLYEAPPMAFLAEQAGGKASDGQKPILLRQPQALHRRCPLIIGSAADVDFVDSLLG

SEQ ID NO: 1407 - protein, 410 aa, Ralstonia solanacearum
MSRRRVVVTGLGLVSPVGNSVAEGWANLVAGKSGIATVTKFDPSNLAVHFAGEVKGFNVEEYLSAKDARQMDTFIHYGIAAGVQALKDSGLEVNEANAERAGVLVGSGIGGLPMIEDTHSTYVERGPRRISPFFVPGSIINMISGHLSIMHGLKGPNLAAVTACTTGLHSIGLAARLIQAGDADVMLAGGAESTVSPLGIGGFAAARALSTRNDDPATASRPWDKDRDGFVLGEGAGVMVLEEYESAKARGARIYAELVGFGMSGDAYHMTAPNMDGPRRCMLNALRDAGINTDQVQYLNAHGTSTPLGDKNESDAIKAAFGEHARKVVVNSTKSMTGHLLGGAGGLESVFSVLALHHQVSPPTINIFNQDPECDLDYCANTARDMKIDVAVKNNFGFGGTNGTLVFRRL

SEQ ID NO: 1408 - protein, 124 aa, Ralstonia solanacearum
MAITKDDILEAVSAMSVMELNDLVKAFEDKFGVSAAAVAVAGPAGGAAAPAAEEKTEFDVILKGAGANKVGVIKAVREITGLGLKEAKDLVDGAPKTVKEAMPKADADAAAKKLIEAGAEVEVK

SEQ ID NO: 1409 - protein, 510 aa, Sinorhizobium meliloti
MNIAAKKIDVASEAAALLDKMGVAKDLYTGGDMPSFSPVTGEKIASLKTVSAAEAAGKIEKADEAFRAWRLVPAPKRGELVRLLGEELRAFKADLGRLVSIEAGKIPSEGLGEVQEMIDICDFAVGLSRQLYGLTIATERPGHRMMETWHPLGVVGIISAFNFPVAVWSWNAALALVCGDAVVWKPSEKTPLTALACQAILERAIARFGDAPEGLSQVLIGDRAIGEVLVDHPKVPLVSATGSTRMGREVGPRLAKRFARAILELGGNNAGIVCPSADLDMALRAIAFGAMGTAGQRCTTLRRLFVHESVYDQLVPRLKKAYQSVSVGNPLESAALVGPLVDKAAFDGMQKAIAEAKNHGGAVTGGERVELGHENGYYVKPALVEMPKQEGPVLEETFAPILYVMKYSDFDAVLAEHNAVAAGLSSSIFTRDMQESERFLAADGSDCGIANVNIGTSGAEIGGAFGGEKETGGGRESGSDAWKAYMRRATNTVNYSKALPLAQGVSFDIE

SEQ ID NO: 1410 - protein, 446 aa, Chenopodium rubrum
MAARAVLQEQPRGGVQQKNGQGGERRNRTALGDIGNVVTARGGAIGAANGIAKPQAINRPLTRSFCAQLVANAQAAAEKKKKQGVKAVDVNVGGARKAGVGVAVAPAAAAQKKVQEKKKTEVVVAETKTPSGHGKVEQKPASKKKKTPTFTSFLTARSKEACGLSKKPQELIVNIDEGSVEDELAVVEYVEDIYSFYKIAEDESRVRDYMDSQPDINEKMRSILVDWLIEVHYKFELRQETLYLTINIIDRFLSMKIVPRKELQLVGIASMLIACKYEEIWAPEVNDFVQISDKAYVREQVLCMEKTILGNLEWYLTVPTPYMFLTRYVKASVTLDSEMENMSYFFSELGMMNYSTTIKYPPSLLAASSVYTARCTLNNSPSWTETLKHYTGYSENQLLECARLLVSFHMAAPEGRLRAVYKKFSKPDNGAVALRPPAKSLLASTS

SEQ ID NO: 1411 - protein, 503 aa, Triticum aestivum; identical to SEQ ID NO: 860

SEQ ID NO: 1412 - protein, 479 aa, Agrobacterium tumefaciens
MSLKTAPVIVWFRKDLRLSDNLALLAAVEHGGPVIPVYIREKSAGPLGGAQEWWLHHSLAALSSSLEKAGGRLVLASGDAERILRDLISETGADTVVWNRRYDPTGMATDKALKQKLRDDGLTVRSFSGQLLHEPSRLQTKSGGPYRVYTPFWRALEGSDEPHAPADPPKSLTAPKVWPKSEKLSNWKLLPTKPDWAKDFSDIWTPGETGALDKLDDFIDGALKGYEEGRDFPAKPATSLLSPHLAAGEISPAAVWHATKGLSRHIASNDISRFRKEIVWREFCYHLLFHFPELGEKNWNDSFDAFSWRDDEKSFKAWTRGMTGYPIVDAGMRQLWQHGTMHNRVRMIVASFLIKHLLIDWRKGEKWFRDTLVDADPASNAANWQWVAGSGADASPFFRIFNPILQGEKFDGDGDYVRRFVPELEKLERKYIHKPFEAPKDALKKAGVELGKTYPLPIVDHGKARERALAAYAAVKKTT

SEQ ID NO: 1413 - protein, 509 aa, Agrobacterium tumefaciens
MDAMTKLDVKQEAAALLDKMGVARDLYTGGDMASFSPVTGEQIASLRTVSVEGVAAVVDKADAAFRTWRNVPAPRRGELIRLLGEELRAFKTDLGRLVSLEAGKIPSEGLGEVQEMIDICDFAVGLSRQLYGLTIATERPGHRMMETWHPLGVVGVISAFNFPVAVWSWNAALALVCGNSVVWKPSEKTPLTALAVQGIFERAAARFGDAPEGLSQLLIGDRAVGEAMVDYPKVPLVSATGSTRMGRDVGPRLAKRFARAILELGGNNAGIVCPSADLDMALRAIAFGAMGTAGQRCTTLRRLFVHDSVYEELVPRLKKAYASVSVGNPLESSALVGPLVDKAAFDGMQKAIEAAKAAGGVVHGGDRVDTGAADAYYVKPALVEMPKQVGPVLEETFAPILYVMKYSDLDQAIDAHNAVAAGLSSSIFTRDIQESERFLSSEGSDCGIANVNIGTSGAEIGGAFGGEKETGGGRESGSDSWKAYMRRATNTINYSKALPLAQGVSFDIE

SEQ ID NO: 1414 - protein, 474 aa, Escherichia coli
MSRLVVVSNRIAPPDEHAASAGGLAVGILGALKAAGGLWFGWSGETGNEDQPLKKVKKGNITWASFNLSEQDLDEYYNQFSNAVLWPAFHYRLDLVQFQRPAWDGYLRVNALLADKLLPLLQDDDIIWIHDYHLLPFAHELRKRGVNNRIGFFLHIPFPTPEIFNALPTYDTLLEQLCDYDLLGFQTENDRLAFLDCLSNLTRVTTRSAKSHTAWGKAFRTEVYPIGIEPKEIAKQAAGPLPPKLAQLKAELKNVQNIFSVERLDYSKGLPERFLAYEALLEKYPQHHGKIRYTQIAPTSRGDVQAYQDIRHQLENEAGRINGKYGQLGWTPLYYLNQHFDRKLLMKIFRYSDVGLVTPLRDGMNLVAKEYVAAQDPANPGVLVLSQFAGAANELTSALIVNPYDRDEVAAALDRALTMSLAERISRHAEMLDVIVKNDINHWQECFISDLKQIVPRSAESQQRDKVATFPKLA

SEQ ID NO: 1415 - protein, 496 aa, Chlamydia trachomatis
MFYSLIPVSRFMIARTKIICTIGPATNTPEMLEKLLDAGMNVARLNFSHGTHESHGRTIAILKELREKRQVPLAIMLDTKGPEIRLGQVESPIKVQPGDRLTLVSKEILGSKESALLFIQVVYSPYVRERAPVLIDDGYIQAVVVNAQEHMVEIEFQNSGEIKSNKSLSIKDIDVALPFMTEKDIADLKFGVEQELDLIAASFVRCNEDIDSMRKVLESFGRPNMPIIAKIENHLGVQNFQEIARAADGIMIARGDLGIELSIVEVPGLQKFMARASRETGRFCITATQMLESMIRNPLPTRAEVSDVANAIYDGTSAVMLSGETASGAHPVHAVKTMRSIIQETEKTFDYHAFFQLNDKNSALKVSPYLEANWVFWIQIAEKASAKAIIVYTQTGGSPMFLSKYRPYLPIIAVTPNRNVYYRLAVEWGVYPMLTLESNRTVWRHQACVYGVEKGILSNYDKILVFSRGAGMQDTNNLTLTTVHDALSPSLDEIVP

SEQ ID NO: 1416 - protein, 633 aa, Agrobacterium tumefaciens
MAKVIGIDLGTTNSCVAVMDGKDTKVIENAEGARTTPSMVAFSDDGERLVGQPAKRQAVTNPTNTLFAVKRLIGRRYEDPTVEKDKALVPFEIVKGDNGDAWVKAQDKNYSPSQISAMILQKMKETAESYLGEKVEKAVITVPAYFNDAQRQATKDAGRIAGLDVLRIINEPTAAALAYGLDKKEGKTIAVYDLGGGTFDISVLEIGDGVFEVKSTNGDTFLGGEDFDMRLVEYLAGEFKKDQGIDLKNDKLALQRLKEAAEKAKIELSSSQQTEINLPFITADASGPKHLTLKLTRAKFESLVDDLVQRTVAPCKAALKDAGVTAAEIDEVVLVGGMSRMPKVQEVVKQLFGKEPHKGVNPDEVVAMGAAIQAGVLQGDVKDVLLLDVTPLSLGIETLGGVFTRLIDRNTTIPTKKSQTFSTAEDNQSAVTIRVSQGEREMAQDNKLLGQFDLVGLPPSPRGVPQIEVTFDIDANGIVQVSAKDKGTGKEQQIRIQASGGLSDADIEKMVKDAEANAEADKKRRAGVEAKNQAESLIHSTEKSVKEYGDKVSETDRKAIEDAIASLKTAVEAAEPDADDIQAKTQTLMEVSMKLGQAIYEAQQAEAGDASAEGKDDVVDADYEEIKDDKKSA

SEQ ID NO: 1417 - protein, 517 aa, Agrobacterium tumefaciens
MNEPLIIALSARTAALCLAAPDARYHLPAQTAWHLSSPDGDGQHGEATTVVTLLHDLRPDTRYVFEAEGFGSLEFRTAPCAGLVEATAFSLRPDIALDDEEGARANATALENAVAAVPAGGTLRLGPGVWTAFPVRLKSDMTLHLAEGAVLRAPSVRNRWPILPARDEAGRMLGSWEGLPDACFAAPVHAIGADNLVIEGRGILDGSGDKGDWWSWPKETREGARRPRGLHLVSCHKTQLLGFTIRNAASWTIHPQGCEDLTAAGLTIIAPHDSPNTDGFNPESCRNVMISGVRFSVGDDCIAVKAGKRGPDGEDDHLAETRGISVRHCLMQRGHGGLVIGSEMSGGVHDVTVEDCDMIGTDRGLRLKTRRGRGGMVGNITMRRVLLDGVQTALSANAHYHCDADGHDDWVQSRNPAPVNDGTPFVDGITVEDVEIRNLAHAAGVFLGLPEAPIRNIVVRNLTIVSHDPSAVATPPIMADRVRPMRHEAIVFEQADVVCDDPALLNDAPVSISSYFD

SEQ ID NO: 1418 - protein, 479 aa, Agrobacterium tumefaciens
MKRNRKVKILATLGPASSEEAMIEKLHLAGADLFRINMSHASHDVMRTLIQRIRSVESRNGRPIGILADLQGPKLRVGKFAETKVDLVPGQTFTLDNNDTPGDNTRVFLPHPEILEAVKPGHRLLIDDGKLHLRAEKSDGKSIVTTVVSGTRISDRKGISLPDTLLGVGVLTDKDRVDLDAVLETNEVDWVALSFVQRPEDLAEVRKISRGRVGLMSKIEKPQAVERIEEIIELSDALMVARGDLGVEMPLEAVPGIQKQLTRACRRAGKPVVVATQMLESMITAPVPTRAEVSDVATAVFEGADAIMLSAESASGDYPIEAVSTMASIASTVEQDPYYSNIIYAQRPQPEATGADAISLAARQIAETLKLAAIVTYTSSGTTGLRAARERPQVPIIALSPIIQTARRLSVVWGLHCVVTGDASDLDDMVNRACRIVVSEGFGKPGDRIIISAGVPLGTPGATNMVRIAYIGSDGQSGV

SEQ ID NO: 1419 - protein, 527 aa, Arabidopsis thaliana
MHSSHLLLEEPIRMTSILEPSKSSFFPALTKIVGTLGPKSRSVEVIAGCLKAGMSVARFDFSWCDADYHQETLENLKIAVKSTKKLCAVMLDTVGPELQVINKTEKAISLKADGLVTLTPSQDQEASSEVLPINFDGLAKAVKKGDTIFVGQYLFTGSETTSVWLEVEEVKGDDVICISRNAATLGGPLFTLHVSQVHIDMPTLTEKDKEVISTWGVQNKIDFLSLSYCRHAEDVRQARELLNSCGDLSQTQIFAKIENEEGLTHFDEILQEADGIILSRGNLGIDLPPEKVFLFQKAALYKCNMAGKPAVLTRVVDSMTDNLRPTRAEATDVANAVLDGSDAILLGAETLRGLYPVETISTVGRICCEAEKVFNQDLFFKKTVKYVGEPMTHLESIASSAVRAAIKVKASVIICFTSSGRAARLIAKYRPTMPVLSVVIPRLTTNQLKWSFSGAFEARQSLIVRGLFPMLADPRHPAESTSATNESVLKVALDHGKQAGVIKSHDRVVVCQKVGDASVVKIIELED

SEQ ID NO: 1420 - protein, 469 aa, Arabidopsis thaliana
MADPTSKDDHDGEGGRDKSSTFVQKLIDVEEAKTQIIYSLPMIFTNLFYYCIPLTSVMFASQLGQLELAGATLANSWATVTGFAFMTGLSGALETLCGQGFGAKSYRMLGIHLQSSCIVSLVFTILITILWFFTESVFLLLRQDPSISKQAALYMKYLAPGLLAYGFLQNILRFCQTQCIVTPLVLFSFLPLVINIGTTYALVHLAGLGFIGAPIATSISLWIAFVSLGFYVICSDKFKETWTGFSMESFHHVVLNLTLSIPSAAMVCLEYWAFEILVFLAGLMRNPEITTSLVAICVNTESISYMLTCGLSAATSTRVSNELGAGNVKGAKKATSVSVKLSLVLALGVVIAILVGHDAWVGLFSNSHVIKEGFASLRFFLAASITLDSIQGVLSGVARGCGWQRLATVINLGTFYLIGMPISVLCGFKLKLHAKGLWIGLICGMFCQSASLLLMTIFRKWTKLTAATV

SEQ ID NO: 1421 - protein, 478 aa, Brucella melitensis
MKRNRKVKILATLGPASGEEAVIRKLFEAGADVFRINMSHADHDLMRTLVKRIRNVEKELGRPIGILADLQGPKLRVGKFKDGKVDLVPGQTFTLDNNEALGDETRVFLPHPEILEAVEPGHRLLIDDGKLHLVAEACDGKSIRCKVVSGTRISDRKGVSLPDTTLGVGALTEKDRCDLDAVLKEEIDWVALSFIQRPEDLAEVRKVSRGKVGLMSKIEKPQAVTRLDEIIELSDALMVARGDLGVEVPLENVPGIQKQITRKARRAGKPVVVATQMLESMITAPVPTRAEVSDVATAVFEGADAIMLSAESASGQYPVEAVATMNRIAEQVEREPTYSTIIDAQRAMPEPTGADAISLAARQIAETLKLSAIVTYTASGTTGLRAARERPRTPIIALSPVVDTARKLSLVWGLHCVITDDAHDLEDMVNHACEIVFHEEFGKAGDRVIITAGVPFGTPGATNMLRIAYIGADGKSGI

SEQ ID NO: 1422 - protein, 424 aa, Brucella melitensis
MSKVSNGGGDSKNTLYCSFCGKSQHEVRKLIAGPTVFICDECVELCMDIIREENKSSMVKSREGVPTPQEIMAVLDDYVIGQKDAKRVLSVAVHNHYKRLAHQSKNSDIELAKSNILLVGPTGCGKTYLAQTLARIIDVPFIMADATTLTEAGYVGEDVENIILKLLQAADYNVERAQRGIVYIDEVDKISRKSDNPSITRDVSGEGVQQALLKIMEGTVASVPPQGGRKHPQQEFLQVDTTNILFICGGAFAGLDRIISARGEKTSIGFGATVKSVDERRIGEVFKELEPEDLLKFGLIPEFVGRLPVIATLEDLDVDALVQILTEPKNALVKQYQRLFDMENVELVFHDDALRAIANKAVERKTGARGLRSIMEKILLDTMFELPTLEGVREVVISGDVVDGSARPLYIYAERQDEKGNVSA

SEQ ID NO: 1423 - protein, 420 aa, Brucella melitensis
MRRVVITGLGLVSPLASGVEETWKRLLAGESGARRVTEFEVDDLACQIACRIPVGDGTNGTFNPDLHMDPKEQRKVDPFIVYAVGAADQALDDAGWHPENDEDQVRTGVLIGSGIGGIEGIVEAGYTLRDKGPRRISPFFIPGRLINLASGHVSIKHKLRGPNHSVVTACATGTHAIGDAARLIAFGDADVMVAGGTESPVSRISLAGFAACKALSTERNDDPTAASRPYDEDRDGFVMGEGAGIVVLEELEHALARGAKIYAEVIGYGMSGDAFHITAPTESGEGAQRCMVAALKRAGIVPDEIDYINAHGTSTMADTIELGAVERVVGEAAAKISMSSTKSSIGHLLGAAGAAEAVFSTLAIRDNIAPATLNLDNPAAQTRIDLVPHKPRERKIDVALSNSFGFGGTNASLVLRRYTA

SEQ ID NO: 1424 - protein, 510 aa, Brucella melitensis
MNTAVRKIDVKKEAADLLSKLGVDASAYTGGDLTGFSPVSGEEIASIKTHSKEDAEKIIAKADEAFRAWRTVPAPKRGELIRLLGEELRASKEDLGRLVSLEAGKIPSEGLGEVQEMIDICDFAVGLSRQLYGLTIATERAGHRMMETWHPLGVVGVISAFNFPVAVWSWNAALAIVCGNAVVWKPSEKTLLTALACDAIFKRALKRFGDAPEGISQLLLGDREIGEVLVDSPKVPVVSATGSTRMGREVGPRLAKRFARAILELGGNNAGIVCPSADLDMALRAIAFGAMGTAGQRCTTLRRLFVHESVYDALVPRLQKAYASVSVGSPLETSALVGPLIDKQAFDNMQKALKEAAAHGGKVQGGERVDTGYENAYYVRPAIVEMPRQEGPVLEETFAPILYVMKYSDFDDVLASHNAVGAGLSSSIFTLNLQEAERFLSAEGSDCGIANVNIGTSGAEIGGAFGGEKETGGGRESGSDAWKAYMRRATNTINYSKALPLAQGVSFDID

SEQ ID NO: 1425 - protein, 340 aa, Brucella melitensis
MTLVGNFSPLVLVGDSDRVEAETVGAYLDGWAGHDKVRLATANAIKAILSGAGRLVGRIARGYLPGDPGKLVGVNSDQDQQKSIDVGSHNLFVELLIAAGVASILSEEADLPVAGKADGLVAVAIDPLDGSGNVGLGAPLGTIFSIFPADVEEPFLQPGNRQIAAGYVSYGNSVDLGFSVGEGVIFATLDPVSGQFHITRRNVKLPERTSDLAFNASVQRHLSAGMQAYVNDAFLGKDGPRGRNFNMRWLGAAVGDMHRIMQRGGLFFYVNDSRPGYEKGRLRLVYEANPIAFLAREAGGKATDGSRPILDIVPQTYHERSALVFGVAEEVDILGEYFVK

SEQ ID NO: 1426 - protein, 787 aa, Micrococcus sp.
MTHGRASDPTRSWSSRARRRRAHERVRRRHGVAPVRGSRARLQRAGGRSGGDRGATEPVGAAAMGGDIHPRSRVVRDPRGRTAHARPRPRPASREEAGRPSPRVRRPPSVETRMPPPPSTKTGRGRGRPGGGMGRRTHTTARNGMPWPHQPTEEGATPHERPNHRGAGGAQARSGRGPRGRRTREAGPGDLPGTRRRRAPSNHRVRRRDGARERVAHRQAAPRRGRRRRAGQRRAGARRRPGPPSTRGRQCSRGRRGRARRGRGGRAGLRPDARGRRRARHRPQPTARLPAARPGPGQVPGSGVAVFEVVGGLYLSGLQGRHHLRAHHGLLLRGQGLTAPGEQFQAEIPAAFGPLIGLLGQHSPDQTHHGIPVREDPHRVRAAPDLPVQPLGRVVRPDLGPHVPRERGEREDVLSCCIEVPSHRGQPVLHVVQQALELGLHGRPVGLVVHAVQHGLHRRPHALRGHGHQIRRVMGAAALPHGPGQVRRHGFHEAAMGVRGHQCHPGQPPGHQVREELVPRRTRLRGGHPQPEDFAAPVGVDPGGDHGHRVDHPPALSDFHGQGVGGEEHERAGLAQRPVTESLDVLVQLLCHPADLGLRERVDAQLPYELVHAPGRDPGQVAVRDHGDQCGLGPFAALEQPFGEVRAGPEFGDGHIDRAGAGVQGSVAVAVALRCPVFGGLAVLGPADRVSVGGEQCVDHGLQQVAQQVWGGLPESFAQQAFRVDNVWSGHRGDVLSRVLWKVRSKAPTVTASVSKMVVATGEGYTTIRDSTQGRALVAQRNATNAQ

SEQ ID NO: 1427 - protein, 520 aa, Arabidopsis thaliana
MSYTSTDSDHNESPAADDNGSDCRSRWDGHALKKGPWSSAEDDILIDYVNKHGEGNWNAVQKHTSLFRCGKSCRLRWANHLRPNLKKGAFSQEEEQLIVELHAKMGNRWARMAAHLPGRTDNEIKNYWNTRIKRRQRAGLPLYPPEMHVEALEWSQEYAKSRVMGEDRRHQDFLQLGSCESNVFFDTLNFTDMVPGTFDLADMTAYKNMGNCASSPRYENFMTPTIPSSKRLWESELLYPGCSSTIKQEFSSPEQFRNTSPQTISKTCSFSVPCDVEHPLYGNRHSPVMIPDSHTPTDGIVPYSKPLYGAVKLELPSFQYSETTFDQWKKSSSPPHSDLLDPFDTYIQSPPPPTGGEESDLYSNFDTGLLDMLLLEAKIRNNSTKNNLYRSCASTIPSADLGQVTVSQTKSEEFDNSLKSFLVHSEMSTQNADETPPRQREKKRKPLLDITRPDVLLASSWLDHGLGIVKETGSMSDALAVLLGDDIGNDYMNMSVGASSGVGSCSWSNMPPVCQMTELP

SEQ ID NO: 1428 - protein, 490 aa, Arabidopsis thaliana
MDGGGETTATATMEGRGLKKGPWTTTEDAILTEYVRKHGEGNWNAVQKNSGLLRCGKSCRLRWANHLRPNLKKGSFTPDEEKIIIDLHAKLGNKWARMASQLPGRTDNEIKNYWNTRMKRRQRAGLPLYPHEIQHQGIDIDDEFEFDLTSFQFQNQDLDHNHQNMIQYTNSSNTSSSSSSFSSSSSQPSKRLRPDPLVSTNPGLNPIPDSSMDFQMFSLYNNSLENDNNQFGFSVPLSSSSSSNEVCNPNHILEYISENSDTRNTNKKDIDAMSYSSLLMGDLEIRSSSFPLGLDNSVLELPSNQRPTHSFSSNPIIDNGVHLEPPSGNSGLLDALLEESQALSRGGLFKDVRVSSSDLCEVQDKRVKMDFENLLIDHLNSSHHSSLGANPNIHNKYNEPTMVKVTVDDDDELLTSLLNNFPSTTTPLPDWYRVTEMQNEASYLAPPSGILMGNHQGNGRVEPPTVPPSSSVDPMASLGSCYWSNMPSIC

SEQ ID NO: 1429 - protein, 219 aa, Arabidopsis thaliana
MGMSLDFDVDLEKGIIDCDNVYTKSPEKPMSPDNKPVITGEESVGSLENDTSPVQCGINKPGWGRSDRKEKRKKSASKPPRPPRGPSLDAADQKLIREIAELAMLKRARIERMRALKKSRAAKAASAASSLGNVLATLFTAIFFFVLVFQGLSPRAAGSSGKSHLVVAGKANGGFVSVQYAGNPSASEPDGGYTGPVLAQRPNLLKPVSGLENEKKSSQ

SEQ ID NO: 1430 - protein, 473 aa, Arabidopsis thaliana
MTNQQEQHIAIFTTASIPWLTGTAVNPLFRAAYLANDGERRVTLVIPWLTLKHQKLVYPNSITFSSPSEQEAYVRQWLEERVSFRLAFEIRFYPGKFAIDKRSILPVGDISDAIPDEEADIAVLEEPEHLTWFHHGQKWKTKFNYVIGIVHTNYLEYVKREKQGRVKAFFLKYLNSWVVGIYCHKVIRLSAATQEYPKSIVCNVHGVNPKFLEIGLRKLEQQKLQEQPFTKGAYYIGKMVWSKGYKELLKLLEKHQKELAELEVDLYGDGEDSEEIKEAARKLDLTVNVYPGRDHADSLFHNYKVFLNPSTTDVVCTTTAEALAMGKIVVCANHISNKFFKQFPNCRTYDDGQGFVRATLKALGEQPSQLTEQQRHELSWEAATQRFIKVSDLNRLSRADSNLSKRSVFASSSISVGKNLEDMSAYIHFLASGFEASRTAFGAIPGSLQPDEELCRDLGLSLNTPSPNTRKQD

SEQ ID NO: 1431 - protein, 467 aa, Clostridium perfringens
MRRTKLVCTIGPASENEEILTKIIEAGMNASRHNFSHGDHEEHKGRMVKVREISKKLGKEVAILLDTKGPEIRTGKFEPSKVELTAGTEFTIYAGAEDVIGDTTKCSVTYAGLAKDVKAGDTILIDDGLVGLEVVSVEGNAVKCVVRNTGLVGTHKGVNVPGVSIKLPAMTDKDRADLIFGCEMGVNMVAASFIRKAEDVKAIREVLVANGGADIQIFSKIENQEGVDNIDAIIEASDGIMVARGDLGVEIPMEDVPSVQKMIIEKCNNAGKPVITATQMLDSMMRNPRPTRAEVSDVTNAILDGTDAIMLSGESANGSWPVEAVETMVKIATKSEEMLSYELASSKAKKHIPAVPGVISRAACNAAHELKSAAIVSLTQSGATAKRISQCRPDAPIVTVTPNERVAKKVALCFGVYPVVAENATMENAVEIAKNAGFVKANDTAVVVAGVPANEGNTNIVKVEVVK

SEQ ID NO: 1432 - protein, 435 aa, Clostridium perfringens
MGKFEDKKQLRCSFCGKNQEQVKRLIAGPGVYICDECIELCSEIIEDEFEGNTESSPLEASNLPKPQEIKDYLDQYVVGQDRAKKSLAVAVYNHYKRINANKAEDDVELQKSNILLLGPTGSGKTLLAQTLAKMLNVPFAIADATTLTEAGYVGEDVENILLKLIQNADYDVERAEKGIIYIDEIDKIARKSENPSITRDVSGEGVQQALLKILEGTTASVPPQGGRKHPHQEFIQINTSNILFICGGAFDGIDKIIEKRGTKSSIGFGAEVKGKSEKNVGELLKDIMPGDLLKFGLIPEFVGRLPVLVTLEALDNEALVSILTKPKNALVKQYKKLFELDNVKLDFTEEALKAIADEAINRKTGARGLRAIVEETMMDIMFDIPSEENIVKATITEETIKDRKDPELEKLPEGEVRPTLKTEKKNKARKDIETA

SEQ ID NO: 1433 - protein, 474 aa, Clostridium perfringens
MQKTKMIFTIGPSSDSEEILREFIRIGMNAARLNFSHGDHASHKEKIELIKRLRKEEKSATAILLDIKGPKIRTYNFKNGEAELKNGDEFTFSCGDEILGDNTKCSISYKELYEDIKPGGSILVDDGLLEFKVKEVRGTDIICEVIEGGTIKDHKGVNVPNVPIKLPAVTEKDRSDLIFGCEMEVDFVAASFIRKPEDVLEVREILDSHGGKDIKIISKIESQEGVDNIKEIIKVTDGVMVARGDMGVEIPIENVPIIQKNIIKKCNQAGKIVITATQMLDSMIRNPRPTRAEASDVCNAIFDGTDAIMLSGESASGSFPIEAAMTMSRIAKKAEANLDYNYLLRRLKDPNPNPDAFADAISYSASKTASKFPTKAIVAATQTGSTAKILSKYKPSCPIIAITPYEKVRRSLALNFGIISKKCAYFNSTDEIIEEARKVAKEFEIAETGDNIMVAAGFPTSITGGTNMLKIEKI

SEQ ID NO: 1434 - protein, 121 aa, Clostridium perfringens
MTKEQIIGALKEMSVLELNEVVKACEEEFGVSAAAPVAVVGGAAAGAAAEEKSEFDVVLTNAGANKIKVIKAVRELTGLGLKEAKEIVDGAPKTLKEAVAKEEAEDMKAKLAEVGAEVELK

SEQ ID NO: 1435 - protein, 616 aa, Triticum aestivum
MGSHGKPPLPYAYKPLPSDADGERAGCTRWRVCAVALTASAMVVVVVGATLLAGFRVDQAVDEEAAGGFPWSNEMLQWQRSGYHFQTAKNYMSDPNGLMYYRGWYHMFFQYNPVGTDWDDGMEWGHAVSRNLVQWRTLPIAMVADQWYDILGVLSGSMTVLPNGTVIMIYTGATNASAVEVQCIATPADPTDPLLRRWTKHPANPVIWSPPGVGTKDFRDPMTAWYDESDDTWRTLLGSKDDNNGHHDGIAMMYKTKDFLNYELIPGILHRVERTGEWECIDFYPVGRRTSDNSSEMLHVLKASMDDERHDYYSLGTYDSAANRWTPIDPELDLGIGLRYDWGKFYASTSFYDPAKKRRVLMGYVGEVDSKRADVVKGWASIQSVPRTIALDEKTRTNLLLWPVEEIETLRLNATELSDVTLNTGSVIHIPLRQGTQLDIEATFHLDASAVAALNEADVGYNCSSSGGAVNRGALGPFGLLVLAAGDRRGEQTAVYFYVSRGLDGGLHTSFCQDELRSSRAKDVTKRVIGSTVPVLDGEAFSMRVLVDHSIVQGFAMGGRTTMTSRVYPMEAYQEAKVYLFNNATGASVTAERLVVHEMDSAHNQLSNMDDHSYVQ

SEQ ID NO: 1436 - protein, 662 aa, Triticum aestivum
MDSSRVILIPGTPPLPYAYEQLPSSSADAKGIEEERAGGGGLRWRACAAVLAASAVVALVVAAAVFGASGAGWDAVAASVPATPATEFPRSRGKEHGVSEKTSGAYSANAFPWSNAMLQWQRTGYHFQPDKYYQNDPNGPVYYGGWYHFFYQYNPSGSVWEPQIVWGHAVSKDLIHWRHLPPALVPDQWYDIKGVLTGSITVLPDGKVILLYTGNTETFAQVTCLAEPADPSDPLLREWVKHPANPVVFPPPGIGMKDFRDPTTAWFDESDGTWRTIIGSKNDSDHSGIVFSYKTKDFLSYELMPGYMYRGPKGTGEYECIDLYAVGGGRKASDMYNSTAEDVLYVLKESSDDDRHDWYSLGRFDAAANKWTPIDEELELGVGLRYDWGKYYASKSFYDPVKKRRVVWAYVGETDSERADITKGWANLQSIPRTVELDEKTRTNLVQWPVEELDALRINTTDLSGITVGAGSVAFLPLHQTAQLDIEATFRIDASAIEALNEADVSYNCTTSSGAATRGALGPFGLLVLANRALTEQTGVYFYVSKGLDGGLRTHFCHDELRSSHASDVVKRVVGSTVPVLDGEDFSVRVLVDHSIVQSFAMGGRLTATSRAYPTEAIYAAAGVYMFNNATGTSVTAEKLVVHDMDSSYNHIYTDDDLVVVD

SEQ ID NO: 1437 - protein, 488 aa, Retama raetam
MVEPSPTTGSFSKLLQTVHGSMPSAASATFPVTTACFNTNTVEERKSNIFEFKPHNKSNMVPADFKNHVSEQSIQAEGPGKAQSFASSPLIECEIDVPSNELSLSSPVQMVSSGASTPVEVDSDELNHKGNTITVLQASQVEEVKGSGLPVAPERASDDGYNWRKYGQKLVKGSEFPRSYYKCTHPNCEVKKLLECSHDGQITEIVYKGMHDHPKPQPSRRYSVSMQEERSGKASLAGRDAEPNSTPDLSSVATNDDSREGADRTNDEVDDDDPFSKRRKMELGFADITHVVKPIREPRVVVKTLSEVDILDDGYRWRKYGQKVVRGNPNPRSYYKCTNAGCPVRKHVERASHDPKAVITTYEGKHNHDVPAARNSSHDMAGPAGVVGGQTRIKLEESDSISLDRGMGISSAAENRSNGQGKMLLSEFGNSQTQTSNSNFKFVHTTAGPVYFGVNPYGSIENRSDGPSLNHASSYPCSQNIGRILTGP

SEQ ID NO: 1438 - protein, 428 aa, Pyrobaculum aerophilum
MYPKKTHWTAEITPNLHGTEVVVAGWVWELRDIGRVKFVVVRDREGFVQVTLKAGKTPDHLFKVFAELSREDVVVIKGIVEASKIAKSGVEIFPSEIWILNKAKPLPIDIWSETPDLATRLKWRSVDLKRPRNLVVFTVASAMLRSIREVLYGEGFVEVFTPKIIVTSTEGGAELFPVMYFERVAYLSQSPQLYKEQLTASLERVFEIGPAYRAEKHNTDYHLNEFISVDAEAAFMDYNDIMDILEKIMRRLASTVSEYAPKLEEVGIKALMELSNIPRVDYDEAVDRLRQLGYAVNWGDDFTVEMQKALMKYYGPVYFIVNFPASLRPFYTKRKDGEKSESYDLIINGIEVASGATRIHKRDELEEEMKKRGLDPRLFESHLSVFDYGMPPHAGFGLGFNRLVTALLGLDNVRHATLYPRDRYRVEP

SEQ ID NO: 1439 - protein, 657 aa, Arabidopsis thaliana
MVIFSIRIFFIVAVICIAFVLPVNYYGQPMVHKEIHLESSEVFTIENLKEGSKWLWVHCLALYIITSAACLLLYFEYSTIAKMRLGHITGCASKPSQFTVLIRAIPWSPEQSYSDTLSKFFTNYYSSSYVSHQMVYHNGIIQRLLRDAERMCQTLKHVSPEINCKPSLRPCTFCGGPTATSSFHILSNEADSVKGMELGELTMTTTTTEQERSAAFVFFKTRYDALVVSEVLQSSNPMLWVTDLAPEPHDVYWKNLNIPYRQLWIRKIATLVGAVAFMFVFLIPVTFIQGLTQLVQLSHAFPFLRGILSKNFINQVITGYLPSVILILFFYAVPPLMMYFSALEGCISRSIRKKSACIKVLYFTIWNVFFVNILSGSVIRQLNVFSSVRDIPAQLARAVPTQAGFFMTYCFTSGWASLACEIMQPMALIWNLVAKVVTKNEDESYETLRFPYHTEIPRLLLFGLLGFTNSVIAPLILPFLLIYFFLAYLIYKNQILNVYITKYESGGQYWPIFHNTTIFSLILTQIIALGFFGLKLSTVASGFTIPLILLTLLFSEYCRQRFAPIFNKNPAQVLIDMDRADEISGKMEELHKKLHNVYSQIPLHSQKSSSKAECSNPFKKQELPDPEKLKPEEGDAIAKELWGFQGNESGQEHDTKS

SEQ ID NO: 1440 - protein, 405 aa, Arabidopsis thaliana
MVKYLKQLSRESFVDVIGVVTLPKEPLTGTTQQVEIQVRKVYCINKSLAKLPLSVEDAARSEADIEASLQTPSPAARVNQDTRLNYRVLDLRTPANQAIFQLQYEVEYAFREKLRFKNFVGIHTPKLMAGSSEGGSAVFRLEYKGQPACLAQSPQLHKQMAICGDLRRVFEVGPVFRAEDSFTHRHLCEFVGLDVEMEIRKHYSEIMDLVDELFVFIFTSLNERCKKELQAVGKQYPFEPLKFLPKTLRLTFEEGVQMLKEAGVEVDPLGDLNTESERKLGQLVLEKYNTEFYILHRYPKAVRPFYTMTCADNPLYSNSFDVFIRGEEIISGAQRVHIPEVLEQRAGECGIDVKTISTYIDSFRYGAPLHGGFGVGLERVVMLFCALNNIRKTSLFPRDPQRLSP

SEQ ID NO: 1441 - protein, 122 aa, Streptococcus pneumoniae
MALNIENIIAEIKEASILELNDLVKAIEEEFGVTAAAPVAVAAADAADAGAAKDSFDVELTSAGDKKVGVIKVVREITGLGLKEAKELVDGAPALVKEGVATAEAEEIKAKLEEAGASVTLK

SEQ ID NO: 1442 - protein, 591 aa, Clostridium perfringens
MKTGKIIKVSGPLVVAEGMDEANVYDVVKVGEKGLIGEIIEMRGDKASIQVYEETSGIGPGDPVITTGEPLSVELGPGLIESMFDGIQRPLDAFMKAANSAFLSKGVEVKSLNREKKWPFVPTAKVGDKVSAGDVIGTVQETAVVLHRIMVPFGVEGTIKEIKAGDFNVEEVIAVVETEKGDKNLTLMQKWPVRKGRPYARKLNPVEPMTTGQRVIDTFFPVAKGGAAAVPGPFGAGKTVVQHQVAKWGDTEIVVYVGCGERGNEMTDVLNEFPELKDPKTGESLMKRTVLIANTSNMPVAAREASIYTGITIAEYFRDMGYSVSIMADSTSRWAEALREMSGRLEEMPGDEGYPAYLGSRLADYYERAGKVVALGKDGREGAVTAIGAVSPPGGDISEPVTQSTLRIVKVFWGLDAQLAYKRHFPSINWLTSYSLYLEKMGEWMDAHVADDWSALRTEAMALLQEEANLEEIVRLVGMDALSEGDRLKLEVAKSIREDYLQQNAFHENDTYTSLNKQYKMLNLILSFKHEAEKALEAGVYLDKVLKLPVRDRIARSKYISEEEISKMDDILVELKSEMNKLISEGGVLNA

SEQ ID NO: 1443 - protein, 737 aa, Pyrobaculum aerophilum
MRLIIVSNRLPVVLTVGERGMEIREAVGGLATAVKSFIKATENGKALGFSEVVWAGWSGIKAEQESEDLKSRLREMGLLPVSLTAEEVNFFYEGFCNSTLWPLFHGFTVYTVFESKYWEAYVKVNQKYAETVASVANTGDFVWIHDYHLMLMPAMLREMSPDVSIGFFLHIPFPPAEMYQLMPPPWRTALLDGVLASDLVGFHIHEYVNNFVRAVSKFLGYRTEAGVIYAGRRKVHVGAFPIGIDFDFFYNSSLDPEVAGQIEELRQKLRGLKIIFSIDRLDYTKGVINRVHAWERFLKEHPQWRGKASFILIVVPSRIGVPQYDAMKREIEREVGRINGELGDVNWTPIVYISRFIPTPTLLALYNIADVALITPLRDGMNLVSKEYVATKRDCKGVLILSETAGASHELLEALIVNPNDESGVVEAIAKALTMEPEEQCRRIKAMQEKLRQQNVVKWAVDFLHSLMLAYRENTESFTTSSKLLDREAIEEIVKIFHGARSRLLLLDYDGTLVPHYPYAYQAVPDGELKRLLNSLAFQPNTYVAVVSGRGRDFLEAWLGDLPIYIVAEHGAFIRDPGGNWSQLFPFDTSWKISVRKIMEEFTRLTPGSYIEEKEISLAWHYRNVEPEIGEKAANRLADALTGLLESSPANIIRGVKVVEVRAAGVNKGVAAKLLYDKLRPELVIIAGDDYTDEEMMKALPEAITIKVGKGETSAKYMAPSYRRIRELLQALLTAQR

SEQ ID NO: 1444 - protein, 459 aa, Pyrobaculum aerophilum
MMNFLTLIPTVSRPPRRLPLSKRLFWTAVVAIVYIMMTITPLYGVQHTTQQGTQPLQQLLSIIFGTAYGTLAHLGIGPIVIAGILLEVFAFSGILNLDLNKREDRLKFTLLLKWTALGIAAVEAVAYVLSGQFGPVTPLGGLLIVLQLLIATVIIILLDDLMSKGWGIGSAISLIIFLSVSKQIFLSLFSWDVAVDNADQRHIVGLIPALGAALYDLFAHGNAASIMGLINREVWLKGQQTPTYLPDFIGLISTLLLAYIILYLEMMKVNIPVTAGQYRGIKFTIPLRFVYVSVLPIIFTTYSLLLVGQLLSPFQQNPVIEAILMIIFPLHRDFSNVPALVLHYLIYVALAIAFAWVWVQLAGLSAEDQARQFARSQLHVPGFRQSEKILAKILERPINALTIISGFIAGSFAALGNILGVWGGGTGLILLVEIALQYYALVMREQMLEMYPGLRQILE

SEQ ID NO: 1445 - protein, 127 aa, Desulfovibrio vulgaris
MSSITKEQVVEFIANMTVLELSEFIKELEEKFGVSAAAPAMMAVAAGPAEAAPAEEEKTEFDVILKAAGANKIGVIKVVRALTGLGLKEAKDKVDGAPSTLKEAVSKEEAEEAKKQLVEAGAEVEVK

SEQ ID NO: 1446 - protein, 125 aa, Rhodobacter sphaeroides
MADLNKLAEDIVGLTLLEAQELKTILKDKYGIEPAAGGAVMMAGPAAGAAAPAEEEKTEFDVGLTDAGANKINVIKEVRAITGLGLKEAKDLVEAGGKVKEAVAKADAEAMKKKLEEAGAKVELK

SEQ ID NO: 1447 - protein, 123 aa, halophilic eubacterium
MALTQEDIINAVAEMSVMEVAELVSAMEEKFGVSAAAAVVAGPGGGEAEEAEEQTEFDLVLTSAGEKKVNVIKVVREITGLGLKEAKAAVDGAPATLKEGMSKEDGDEAKTKLEEAGASVELK

SEQ ID NO: 1448 - protein, 294 aa, Sesbania rostrata
MEQYEKVEKIGEGTYGVVYKARDRVTNETIALKKIRLEQEDEGVPSTAIREISLLKEMQHRNIIRLQDVVHSEKRLYLVFEYLDLDLKKHMDSSPEFVKDPRQVKMFLYQILCGIAYCHSHRVLHRDLKPQNLLIDRRTNSLKLADFGLARAFGIPVRTFTHEVVTLWYRAPGILLGSRHYSTPVDIWSVGCIFAEMVNRRPLFPGDSEIDELFKIFRILGTPNEDTWPGVTSLPDFKSTFPKWPPKDLATVVPNLEQAGLNLLSSMLCLDPSKRITARSAVEHEYFKDIKFVP

SEQ ID NO: 1449 - protein, 1032 aa, Neurospora crassa
MADIKIDSKVFQERVSHFYNAWKADKRSGDALFGGVSSIVILMGKVDENPEFHKNNAIHFWLLGYEFPTTLMLFTLDTIYILTTQKKAKYLDQVKGGRYPVEVLVRGKDAAENEKLFIKITDAIKAAGKKVGVLTKDTSKGPFIDEWKKVYADNCKDVEEVDVAQALSAGAFSVKDETELRAMRTSSKACVALLTPYFLDEMSNILDQDKKIKHSALADKVFNKLEDDKFWKTVELPNRQKLPADLDPEQLDWILGPIVQSGGKFDLKWQADSDNDILHPGIIIAAMGLRYKSYCSQIARTFMVDPNKSQESNYKFLLAVHNLILKEIRDGAIVKDVYTKAYNFVRSKKPDLEKHFLKNVGFGIGLENKDPTLILNNKNTRTLKDGMTLVVTTGFSDIQNPNPQDKNSKVYSLILSDTIRVTSSEPVVFTGEAPVDVDATSFFFKDEEEAQPTPKKEKRDSRVGAVATKNITSTRLRSERNTTVDEDADKRRREHQKELAQKKQKEGLAKYAESTADENGVEIKKFKRFESYKRDNQFPPKVKDMGIVIDQKNATIVLPVMGRPVPFHINTIKNASKSDEGEWSFLRINFLSPGQGVGRKDEQPFEDASAHFVRSLTFKSTDGDRYADIANQISNLKRDAVKKEQEKKDMEDVVEQDKLVEIRNRRPAVLDNVFIRPAMEGKRVPGKVEIHQNGIRYQSPLSTTQRVDILFSNVRHLFFQPCQHELIVIIHIHLKDPIIIGNKKKTKDVQFYREATDIQFDETGNRKRKYRYGDEDEFEAEQEERRRRAELDRLFKSFAEKIAEAGRNEGIEVDMPLRDLGFNGVPFRSNVYIQPTTECLIQITEPPFMVITLEDIEVAHLERVQFGLKNFDLVFVFKDFTRPPYHINTIPVESLEDVKEFLDSSDIAFSEGPLNLNWGVIMKTVTANTHQFFLDGGWGFLQNDSDDDEVEEEEEESAFEIDESELEDASESSEEDSEYDSNASEEASDEAEDSEEEEGEDWDELERKAKKRDRESGFDDEEERAAPKKRRK

SEQ ID NO: 1450 - protein, 270 aa, Arabidopsis thaliana
KETKGAVYSLNAFNGKLLAAINQKIQLYKWMLRDDGTRELQSECGHHGHILALYVQTRGDFIVVGDLMKSISLLLYKHEEGAIEERARDYNANWMSAVEILDDDIYLGAENNFNLLTVKKNSEGATDEERGRLEVVGEYHLGEFVNRFRHGSLVMRLPDSEIGQIPTVIFGTVNGVIGVIASLPQEQYTFLEKLQSSLRKVIKGVGGLSHEQWRSFNNEKRTAEARNFLDGDLIESFLDLSRNKMEDISKSMNVQVEELCKRVEELTRLH

SEQ ID NO: 1451 - protein, 772 aa, Arabidopsis thaliana
MAEMADKAKVEEMDWEGIDGVRMTWNLWPRTKVEASKCVIPLAASISPIRRHPLILDLPYAPLDCKTCKALLNAFARVDFAAMNWVCPFCYHRNHFPSHYHSISEINLPGELYPQYTTVEYTLPPDPSRVPPPPVFVFVLDTCMIEEELGYAKSALKQAIGLLPENALVGFVSFGTQAHVHELGFSEMSKVFVFKGNKEVTKDQILDQLGLGSSSRRAPTSGFSKGAQNGFQSSGVDRFLLPASECEYTLDLLLDELQSDQWPVQPGHRPQRCTGVALSVAAGLLGACLPGTGARIVALVGGPCTEGPGTIISKDLSDPVRSHKDLDKDAAPYYKKAVKFYDSIAKQLVAQGHVLDLFASALDQVGVAEMKVAVESTGGLVVLSESFGHSVFKDSFKRMFEDGEHSLGLCFNGTLEINCSKDIKIQGVIGPCSSLEKKGPNVADTVIGEGNTSAWKLCGLDKSTCLTVFFDLSSTGSTAPGALNQQLYLQFITRYQNSEGKSLARVTTLTRQWVDTAVSTENLVQGFDQETAAVVMARLTSLKMETEEGFDATRWLDRTLIRLCSKFGEYRKDDPTSFTLKPYLTLFPQFMFNLRRSQFVQVFNNSPDETAYFRMLLNRENISNAIVMIQPSLTSYSFNSGPQAALLDVASIAADKILLLDAYFSVVVFHGMTISQWRNMGYHHQPEHEAFAQLLQAPQEDSQMLVRERFPVPRLVVCDQHGSQARFLLAKLNPSATYNNANEMSAGSDIIFTDDVSLQVFIEHLQKLAVQS

SEQ ID NO: 1452 - protein, 921 aa, Sorghum bicolor
MTTTAARALVALLLVAVAVADDGATLVEIKKSFRNVGNVLYDWAGDDYCSWRGVLCDNVTFAVAALNLSGLNLEGEISPAVGSLKSLVSIDLKSNGLSGQIPDEIGDCSSLRTLDFSFNNLDGDIPFSISKLKHLENLILKNNQLIGAIPSTLSQLPNLKILDLAQNKLTGEIPRLIYWNEVLQYLDVKNNSLTGVIPDTIGNCTSFQVLDLSYNRFTGPIPFNIGFLQVATLSLQGNKFTGPIPSVIGLMQALAVLDLSYNQLSGPIPSILGNLTYTEKLYIQGNKLTGSIPPELGNMSTLHYLELNDNQLTGSIPPELGRLTGLFDLNLANNHLEGPIPDNLSSCVNLNSFNAYGNKLNGTIPRSLRKLESMTYLNLSSNFISGSIPIELSRINNLDTLDLSCNMMTGPIPSSIGSLEHLLRLNLSKNGLVGFIPAEFGNLRSVMEIDLSYNHLGGLIPQELEMLQNLMLLNVSYNNLAGVVPADNNFTRFSPDSFLGNPGLCGYWLGSSCRSTGHHEKPPISKAAIIGVAVGGLVILLMILVAVCRPHRPPAFKDVTVSKPVRNAPPKLVILHMNMALHVYDDIMRMTENLSEKYIIGYGASSTVYKCVLKNCKPVAIKKLYAHYPQSLKEFETELETVGSIKHRNLVSLQGYSLSPVGNLLFYDYMECGSLWDVLHEGSSKKKKLDWETRLRIALGAAQGLAYLHHDCSPRIIHRDVKSKNILLDKDYEAHLTDFGIAKSLCVSKTHTSTYVMGTIGYIDPEYARTSRLNEKSDVYRLWHCSAGAADWQEASGQRILSKTASNEVMDTVDPDIGDTCKDLGEVKKLFQLALLCTKRQPSDRPTMHEVVRVLDCLVNPDPPPKPSAHQLPQPSPAVPSYINEYVSLRGTGALSCANSTSTSDAELFLKFGEAISQNME

SEQ ID NO: 1453 - protein, 783 aa, Arabidopsis thaliana
MSEMASMDPEGIDGVRMTWNVWPRTKVEASKCVIPVAACISPIRYHRDIPSVEYAPLRCRICTAALNPFARVDFLAKIWICPICFQRNHFPPHYHVMSETNVPCELYPQYTTVEYTLPNPSQPTGVGNFDQTGAVSGQPSPSVFVFVLDTCMIEEEFGYAKSALKQAIGLLPENALVGFVSFGTQAHVHELGFSDLTKVYVFRGDKEISKDQVLEQLGLGASGRRNPVGGFPMGRDNSANFGYSGVNRFLLPASDCEFTIDLLLEELQTDQWPVQAGRRQSRCTGVAISVATGLLGACFPGTGARIVALIGGPCSEGPGTIVSKDLSEPLRSHKDLDKDAAPFYKKAEKFYDALANQLVNQGHVLDLFASALDQVGVAEMKAAVERTGGLVVLSESFGHSVFKDSFKRVFEDGEESLGLCFNGTLEICCSKDIKIQGIIGPCASLQKKGPSVADTVIGEGNTTQWKMCGLDKRTCLTVFFDLSSSDQSSAPGGVNNQLYLQFMTSYQNSKGKTLQRVTTVTRQWVDTGLSTEELVQGFDQETAAVVVARLASLKMETEEGFDATRWLDRNLIRLCSKFGDYRKDDPASFTLNPNFSLFPQFTFNLRRSQFVQVFNNSPDETAYNRMLLNRENISNAAVMIQPSLTTYSFNSLPQPALLDVASIGADRILLLDSYISVVVFHGMTIAQWRNLGYQNQPEHQAFAQLLEAPQEDAQMIIRDRFPVPRLVVCDQHGSQARFLLAKLNPSATYNNASEMNAGSDIIFTDDVSLQVFFQHLQKLAVQS

SEQ ID NO: 1454 - protein, 452 aa, Arabidopsis thaliana
MADIDIGTAATTGGNEGRGGTRERLINRENKFTRSVSHAQDELHSFRKYLRWMCVDQSSPWTAVLSWSMFVVFTLVVPATSHFMLACSDCDSHHSRPYDSVVQLSLSSFAALSFLCLSRFVSKYGLRRFLFFDKLWDESETVRLGYTNQLNRSLKILSYFVSPCFLAMSSYKIWWYASGASQIPFLGNVILSDTVACLMELCSWLYRTTVIFLVCVLFRLICHLQILRLQDFAQVFQMDSDVGSILSEHLRIRRHLRIISHRYRTFILLSLILVTGSQFYSLLITTKAYAELNIYRAGELALCSMTLVTALLILLRSASKITHKAQAVTCLAAKWHVCATIESFETVDGETPRLVDRASGHGYYPTDDDNGESDSEDYGDEEDDFDNNNLIPAYAYSTISFQKRQALVNYFENNRSGITVFGFTLDRSTLHTIFGIEMSLVLWLLGKTIGIS

SEQ ID NO: 1455 - protein, 1550 aa, Arabidopsis thaliana
MDRNREARRVPMAAAGNGLSRRRHRAGSFRDSPEEEGPVELPEAARLRDRGGSNKKDRDRERDRDRERERERDRERDRLNSRSKRRRGERLMMVHGNLDDGGDDSSEESVNDDEEYDDGGVGPPSSLKMLPPTSNNISAASFSSSLSNHHNGGSGNLHHHHHSHNNNHQRKNNFPPTKVFRSSPSPAPVSPLVSTWKAADEMIGVSVPRKARSACTKRPHESWASSTTGGGVFASGEQIHRQISSTSPANRVSPASILASPSPPAPTSPSSSSISVRKKLPSGTKQKPLPPKSSSSKLSSPVAVQDEIEIEIAEVLYGMMRMPSTSKQEAAGNDLTEAAKSTVEVKSRVSSPISNPQTLPQSSITLAANSSSSNVSAIAPKRKKPRHVKYEDDNSSRVTTIKSEAEAPSKSQVPFSNQLKSSGSGEGNSSVLDSIIPLTRESNASLDSEKKENNLSKDETILPKVESSSGFRSDGEGAKSSSPEKEKFEIDLMAPPPVRSSSERGGEMMECVAAEAKPKVTEVETEAKPLLKEDRSDPAIHDSQEKKRPRMVAEAEHHKFERNCELKLDLDKSDHVGLVNKHHVQKPPPQQQLSVPDKTAQASHLPLHMSMPGWPGGLPTMGYMAPTQGVVPTDTSSLSAAAMQPPPHLLFNQPRPKRCATHCYIARNIQSHQQFTKMNPFWPAAAGSAPMYGTKACNLSLMPPTELQGSVLGRSSNPVQDKNSQSTSKSSETAQRNQLMLQQALPPGAANSILHGPTFIFPLGQQPHAAATIAAASVRPPNSGITSSGPTATSTSMNGSASATPAGAPTMSFSYPAMPGNETQYLAILQNNGYPFPVPAHVGAQPAYRGAPGQPMPFFNGSFYSSQMIQPPHHQPQKQHQQQLTGQMLQSHAPNNQNGSASTGSSAAQKHLQNQQLRPPINHGNSQGFPTHKVQSQPLNFQQRQQPRENATQHSETVGEDSPSTADSRGSRSNVAYGQNYGMQMQPTNLGLMSSPAPGGGVVGSSSSHGEKKSQQQVSKAGVESFQSPGYAMTFATFNGANTAPTLNMSSIAQNHAMFHSMPEAARQGYQMMAAQAAQQKMNYGASLEDGKSGSIGGAATANNTPEEQRKSGGGAIGKTSGGNGGQSIAFSNKQDLADASVSAVTSGSIVDSSSRLLNLGSALPQSSGSLPTSHHQQLLQQQQQQHMQRSQSQQPYTTMYLQKQQRYATSVAASAARTKGPVVSNGSGFPDHNMTTSPAGTTKFANANSGFPQNLVQSSSNQVQSQQWKNNSPRTTNTTQAQSPSMLSPSTSVAAASSLRNIPHKQQSRPQQSQISFAANSKPMTSGSPMQQVQGGTNHQAPSPPMLVGSPSTSSVSKNASGSPRTTASASSAANKGGQASTTTHSASQPSKNLQPASAASSAGGRNNGPSVLGNPTTSSGSKSQQQQQLPKHGLQPQAQLFFSNPYMQAQHQHQQQQITISPSGGYYIQRHQQQSGSAPAVPVTGAVTATSDPAKAIAAASAANNMKGGGGMGKTQQHQLGPPGFTNVHAVSSAVQVKPVDQKQQAGE

SEQ ID NO: 1456 - protein, 443 aa, Arabidopsis thaliana
MYVVPPPQRSDSGSNGDLRVYQTWKGSNIFFLQGRFVFGPDVRSLALTICLIAVPVTIFCIFVARKLIDDFSDSWGVSIVAVAVVFTIYDLILLLLTSGRDPGIIPRNAHPPEPETLDGNMDAGAGQTPQLRLPRIKEVQLNGITFKVKYCDTCMLYRPPRCSHCSICNNCVERFDHHCPWVGQCIGMRNYRFFFMFVFSTTLLCIYVFAFCWVYIRKIMESEHTTTWKAMLKTPASIVLIIYTFISMWFVGGLTVFHLYLISTNQTTYENFRYRYDRRSNPHNKGVVNNFKETFFSTIPPSKNDFRAMVQREPPLPPRSVAGGFMSPNMGKANDEIEMGRKAVWADMGPAMSDHGDGKHGNNERLHVKDGELGELSPDIRATVDEQSDRPSMHPRRSSWGRKSGSWDMSPEVMALAARVGEQNQNGGGSSSGSGLVTENRPT

SEQ ID NO: 1457 - protein, 1032 aa, Arabidopsis thaliana
MLRLWRYLCLLLTVWFLCNFGPVYVVRAQNRTGATTHPDEALALNSIFAAWRIRAPREWNISGELCSGAAIDASVLDSNPAYNPLIKCDCSFENSTICRITNIKVYAMEVVGSIPQQLWTLEYLTNLNLGQNVLTGSLPPALGNLTRMRWMTFGINALSGPIPKEIGLLTDLRLLSISSNNFSGSIPDEIGRCTKLQQIYIDSSGLSGGLPVSFANLVELEQAWIADMELTGQIPDFIGDWTKLTTLRILGTGLSGPIPASFSNLTSLTELLGDISNGNSSLEFIKDMKSLSILVLRNNNLTGTIPSNIGEYSSLRQLDLSFNKLHGTIPASLFNLRQLTHLFLGNNTLNGSLPTQKGQSLSNVDVSYNDLSGSLPSWVSLPNLNLNLVANNFTLEGLDNRVLSGLNCLQKNFPCNRGKGIYSDFSINCGGPEIRSVTEAVFEREDEDLGPASFVVSAGQRWAASSVGLFAGSSNNIYISTSQSQFVNTLDSELFQSARLSASSLRYYGLGLENGGYTVTLQFAEIQILGSTSNTWRGLGRRRFDIYVQGRLVEKDFDVRRTAGDSTVRAVQREYKANVSQNHLEIHLFWAGKGTCCIPIQGAYGPLISAVGATPDFTPTVGNRPPSKGKSMTGTIVGVIVGVGLLSIISGVVIFIIRKRRKRYTDDEEILSMDVKPYTFTYSELKSATQDFDPSNKLGEGGFGPVYKGKLNDGREVAVKLLSVGSRQGKGQFVAEIVAISAVQHRNLVKLYGCCYEGEHRLLVYEYLPNGSLDQALFGEKTLHLDWSTRYEICLGVARGLVYLHEEARLRIVHRDVKASNILLDSKLVPKVSDFGLAKLYDDKKTHISTRVAGTIGYLAPEYAMRGHLTEKTDVYAFGVVALELVSGRPNSDENLEDEKRYLLEWAWNLHEKGREVELIDHQLTEFNMEEGKRMIGIALLCTQTSHALRPPMSRVVAMLSGDVEVSDVTSKPGYLTDWRFDDTTASSISGFPLRNTQASESFTSFVAPRSEISPRNNDARPMLGAQMNEGR

SEQ ID NO: 1458 - protein, 1012 aa, Arabidopsis thaliana
MLRLILSLVVWFVFMSGLFHVVRSQNRTTATTDPDEARALNKIFRTWKITATKAWNISGELCSGAAIDDSVSIDNLAFNPLIKCDCSFVDSTICRIVALRARGMDVAGPIPDDLWTLVYISNLNLNQNFLTGPLSPGIGNLTRMQWMTFGANALSGPVPKEIGLLTDLRSLAIDMNNFSGSLPPEIGNCTRLVKMYIGSSGLSGEIPSSFANFVNLEEAWINDIRLTGQIPDFIGNWTKLTTLRILGTSLSGPIPSTFANLISLTELRLGEISNISSSLQFIREMKSISVLVLRNNNLTGTIPSNIGDYLGLRQLDLSFNKLTGQIPAPLFNSRQLTHLFLGNNRLNGSLPTQKSPSLSNIDVSYNDLTGDLPSWVRLPNLQLNLIANHFTVGGSNRRALPRLDCLQKDFRCNRGKGVYFNFFVNCGGRDIRSSSGALYEKDEGALGPATFFVSKTQRWAVSNVGLFTGSNSNQYIALSATQFANTSDSELFQSARLSASSLRYYGLGLENGGYSVTVQFAEIQIQGSNTWKSLGRRIFDIYVQGKLVEKDFDMQKAANGSSIRVIQRVYKANVSENYLEVHLFWAGKGTCCIPAQGTYGPLVSAISATPDFIPTVKNKLPSKSKKNIVIIVGAIVGAGMLCILVIAILLFIRRKRKRAADEEVLNSLHIRPYTFSYSELRTATQDFDPSNKLGEGGFGPVFKGKLNDGREIAVKQLSVASRQGKGQFVAEIATISAVQHRNLVKLYGCCIEGNQRMLVYEYLSNKSLDQALFEEKSLQLGWSQRFEICLGVAKGLAYMHEESNPRIVHRDVKASNILLDSDLVPKLSDFGLAKLYDDKKTHISTRVAGTIGYLSPEYVMLGHLTEKTDVFAFGIVALEIVSGRPNSSPELDDDKQYLLEWAWSLHQEQRDMEVVDPDLTEFDKEEVKRVIGVAFLCTQTDHAIRPTMSRVVGMLTGDVEITEANAKPGYVSERTFENAMSFMSGSTSSSWILPETPKDSSKSQVEEHGRRH

SEQ ID NO: 1459 - protein, 1010 aa, Arabidopsis thaliana
MRLFLLLAFNALMLLETHGFTDETDRQALLQFKSQVSEDKRVVLSSWNHSFPLCNWKGVTCGRKNKRVTHLELGRLQLGGVISPSIGNLSFLVSLDLYENFFGGTIPQEVGQLSRLEYLDMGINYLRGPIPLGLYNCSRLLNLRLDSNRLGGSVPSELGSLTNLVQLNLYGNNMRGKLPTSLGNLTLLEQLALSHNNLEGEIPSDVAQLTQIWSLQLVANNFSGVFPPALYNLSSLKLLGIGYNHFSGRLRPDLGILLPNLLSFNMGGNYFTGSIPTTLSNISTLERLGMNENNLTGSIPTFGNVPNLKLLFLHTNSLGSDSSRDLEFLTSLTNCTQLETLGIGRNRLGGDLPISIANLSAKLVTLDLGGTLISGSIPYDIGNLINLQKLILDQNMLSGPLPTSLGKLLNLRYLSLFSNRLSGGIPAFIGNMTMLETLDLSNNGFEGIVPTSLGNCSHLLELWIGDNKLNGTIPLEIMKIQQLLRLDMSGNSLIGSLPQDIGALQNLGTLSLGDNKLSGKLPQTLGNCLTMESLFLEGNLFYGDIPDLKGLVGVKEVDLSNNDLSGSIPEYFASFSKLEYLNLSFNNLEGKVPVKGIFENATTVSIVGNNDLCGGIMGFQLKPCLSQAPSVVKKHSSRLKKVVIGVSVGITLLLLLFMASVTLIWLRKRKKNKETNNPTPSTLEVLHEKISYGDLRNATNGFSSSNMVGSGSFGTVYKALLLTEKKVVAVKVLNMQRRGAMKSFMAECESLKDIRHRNLVKLLTACSSIDFQGNEFRALIYEFMPNGSLDMWLHPEEVEEIHRPSRTLTLLERLNIAIDVASVLDYLHVHCHEPIAHCDLKPSNVLLDDDLTAHVSDFGLARLLLKFDEESFFNQLSSAGVRGTIGYAAPEYGVGGQPSINGDVYSFGILLLEMFTGKRPTNELFGGNFTLNSYTKSALPERILDIVDESILHIGLRVGFPVVECLTMVFEVGLRCCEESPMNRLATSIVVKELISIRERFFKASRTTWR

SEQ ID NO: 1460 - protein, 471 aa, Arabidopsis thaliana
MKRSFLLLYVLLVQAFYGAWCSVGESLHCEYSNLASLHRPHSVSITEFGAVGDGVTLNTKAFQNALFYLNSFSDKGGAKLFVPAGQWLTGSFDLISHLTLWLDKGATILGSTSSENWPVVDPLPSYGRGRELPGRRHRSLIYGQNLTDVVITGENGTIDGQGTVWWDWFRNGELNYTRPHLVELMNSTGLIISNLTFLNSPFWNIHPVYCRDVVVKNLTILAPLESPNTDGVDPDSSTNVCIEDCYIVTGDDLVSIKSGWDEYGISYARPSSKIKINRLTGQTTSSSGIAIGSEMSGGVSEIYIKDLHLFNSNTGIRIKTSAGRGGYVRNVHILNVKLDNVKKAIRFTGKYGEHPDEKYDPKALPAIEKITFENVNGDGIGVAGLLEGIEGDVFKNICFLNVTLRVKKNSKKSPWECSNVRGYSQWVSPEITCDSLKESIFPEHGSDCFGLSENNMEISSGLSRSPWLLSW

SEQ ID NO: 1461 - protein, 548 aa, Arabidopsis thaliana
MELTLNSSSSLIKRKDAKSSRNQESSSNNMTFAKMKPPTYQFQAKNSVKEMKFTHEKTFTPEGETLEKWEKLHVLSYPHSKNDASVPVFVMLPLDTVTMSGHLNKPRAMNASLMALKGAGVEGVMVDAWWGLVEKDGPMNYNWEGYAELIQMVQKHGLKLQVVMSFHQCGGNVGDSCSIPLPPWVLEEISKNPDLVYTDKSGRRNPEYISLGCDSVPVLRGRTPIQVYSDFMRSFRERFEGYIGGVIAEIQVGMGPCGELRYPSYPESNGTWRFPGIGEFQCYDKYMKSSLQAYAESIGKTNWGTSGPHDAGEYKNLPEDTEFFRRDGTWNSEYGKFFMEWYSGKLLEHGDQLLSSAKGIFQGSGAKLSGKVAGIHWHYNTRSHAAELTAGYYNTRNHDGYLPIAKMFNKHGVVLNFTCMEMKDGEQPEHANCSPEGLVKQVQNATRQAGTELAGENALERYDSSAFGQVVATNRSDSGNGLTAFTYLRMNKRLFEGQNWQQLVEFVKNMKEGGHGRRLSKEDTTGSDLYVGFVKGKIAENVEEAALV

SEQ ID NO: 1462 - protein, 499 aa, Arabidopsis thaliana
MERYTLLKEVGDGTFGNVWRAVNKQTNEVVAIKRMKKKYFSWEECVNLREVKSLSRMNHPNIVKLKEVIRENDILYFVFEYMECNLYQLMKDRPKHFAESDIRNWCFQVFQGLSYMHQRGYFHRDLKPENLLVSKDVIKIADLGLAREIDSSPPYTEYVSTRWYRAPEVLLQSYVYTSKVDMWAMGAIMAELLSLRPLFPGASEADEIYKICSVIGSPTEETWLEGLNLASVINYQFPQFPGVHLSSVMPYASADAVNLIERLCSWDPCNRPTTAEALQHPFFQSCYYIPPSLRPKLSEPRGSLEQQQSVKRLPAAPTYNANKPLNTYVTPKTNAPFSNGVNSYVTPKTNAPFSNGVNSYVTAKTNAPFSNGVNNYVAPKMNAPFDNGATQQKVDTTNNNNQNTAWNNKPVRSYNVKDSKYRPPGRKSPLAASMEKNWVFSRGASETANKLANATIGGRWTQSQRQQQPAMKAGWVGESGDMFLRPTQPSNPYSRKIAG

SEQ ID NO: 1463 - protein, 606 aa, Arabidopsis thaliana
MFCSLSISRFVSRKTITSSSLLSRSFRFLLSVDSPPHIPLLRPSSNTLIPSSSFSRRIWDSCSGGGGGGGGDDYDHIRSDVNCPRCSAQMHVIFSNRPLSLTAREPGIYQAVNFCSQCKTAFYFRPFKLSPLQGSFIELGKVKGTDDDHDDDDDDQKSFPRNWKIQGLRSDEDGEDADEEEDESNGGDKEKQSVIKLPTPKEICQGLDEFVIGQEKAKKVLSVAVYNHYKRIYHASRKKGSASESYNIDMEDDNIDHVELDKSNVLLLGPTGSGKTLLAKTLARIVNVPFAIADATSLTQAGYVGEDVESILYKLYVVSGCNVEEAQRGIVYIDEVDKMTMKSHSSNGGRDVSGEGVQQSLLKLLEGTVVPIPEKGLRRDPRGDSIQMDTKDILFICGGAFIDLEKTVSERQHDASIGFGASVRTNMSTSGLSSAAVTSSLLESLQSEDLVAYGLIPEFVGRLPILVSLSALNEDQLVQVLTEPKSALGKQYKKLFRMNNVQLQFTEGATRLIARKAMSKNTGARGLRSILESILTEAMFEVPDSITEGSQSIKAVLVDEEAVGSVGSPGCGAKILKGDNVLQQFVEEAESKEKSKEDEAKRAQSM

SEQ ID NO: 1464 - protein, 523 aa, Arabidopsis thaliana
MIMYGGGGAGKDGGSTNHLSDGGVILKKGPWTAAEDEILAAYVRENGEGNWNAVQKNTGLARCGKSCRLRWANHLRPNLKKGSFTGDEERLIIQLHAQLGNKWARMAAQLPGRTDNEIKNYWNTRLKRLLRQGLPLYPPDIIPNHQLHPHPHHQQQQQHNHHHHHHQQQQQHQQMYFQPQSSQRNTPSSSPLPSPTPANAKSSSSFTFHTTTANLLHPLSPHTPNTPSQLSSTPPPPPLSSPLCSPRNNQYPTLPLFALPRSQINNNNNGNFTFPRPPPLLQPPSSLFAKRYNNANTPLNCINRVSTAPFSPVSRDSYTSFLTLPYPSPTAQTATYHNTNNPYSSSPSFSLNPSSSSYPTSTSSPSFLHSHYTPSSTSFHTNPVYSMKQEQLPSNQIPQIDGFNNVNNFTDNERQNHNLNSSGAHRRSSSCSLLEDVFEEAEALASGGRGRPPKRRQLTASLPNHNNNTNNNDNFFSVSFGHYDSSDNLCSLQGKTKTTYNTSNLNYSSLQVKCKMFMIKTQI

SEQ ID NO: 1465 - protein, 188 aa, Allium cepa
WMNDPDGPLYYKGWYHFFYQYNPEGAVWGNIAWGHAVSRDLVHWTHLPLAMVPDQWYDINGVWTGSATILPDGQIVMLYTGATSESVQVQNLAVPADQSDTLLLRWKKSEANPILVPPPGIGDKDFRDPTTAWYEPSDDTWRIVIGSKDSSHSGIAIVYSTKDFINYKLIPGILHAVERVGMWECVDL

SEQ ID NO: 1466 - protein, 640 aa, Capsicum annuum
MAIHPSSYDPETSTTHYTFLPGQPDSGHRKSIKVVSVILLSSFFLLYLAAFVILNNQPPNLQNKSPSASETLTPATPSRGVSQGVSEKTFKDVSGTSQVSYTWSNAMLNWQRTAYHFQPQKNWMNDPNGPLYHKGWYHLFYQYNPDSAIWGNITWGHAVSTDLIHWLYLPFAMVPDQWYDINGVWTGSATILPDGLIMMLYTGDTDDYVQVQNLAYPANLSDPLLLDWVKYQGNPVLVPPPGIGVKDFRDPTTAWTGPQNGQWLLTIGSKVGKTGIALVYETSNFKLLDGVLHAVPGTGMWECVDFYPVSTLDANGLDTSYNGPGIKHVLKASLDDNKQDHYVIGTYDPVKNKFSPDNPDLDCGIGLRLDYGRYYASKTFYDPKKQRRVLWGWIGETDSESADLQKGWASVQSIPRTVLFDKKTGTHLLQWPVAEIESLRSGDPKVKEVNLQPGSIELLHVDSAAQFDIEASFEVDRVTLEGIIEADVGYNCSTSGGAASRGILGPFGVVVIADQTLSELTPVYFYISRGADGRAEAHFCADQTRSSEAPGVAKQVYGSSVPVLDGEKHRMRLLVDHSIVESFAQGGRTVITSRIYPTKAVNGAARLFVFNNATGAIVTASLKIWSLESADIRSFPLQKL

SEQ ID NO: 1467 - protein, 239 aa, Phalaenopsis equestris
MDSSSMEPKEKMGRGKIEIKRIENTTNRQVTFCKRRNGLLKKAYELSVLCDAEVALIIFSTRGRLYEYANNSVKGTIERYKKASTDNSNTGSISEANSQYYQQEATKLRQQITNLQNSNRNLLGDALTTMSLRDLKQLETRLEKGINKIRAKKNELLHAEIDYMQKREMELQTDNMFLRNKISDNERAQQQHQHMSILPSTSTEYEVMPPFDSRSFLHVNLMDPNDRYSHQQQTALQLG

SEQ ID NO: 1468 - protein, 692 aa, Schizosaccharomyces pombe
GTRNGVRSRPVWLPGPEKGSETIINETRSQQSRWLAYAENVIRPLIHYKYWPSSEVDENEEQWWRDYVKMNHAFADKICEIYKPGDFIIVQDYSLFLVPQLIRNKIDDAVIGFYHHHPFPSSEIARCFPRRRAILRSVLGADFIGFEDYSYASHFISCCSRVLDLEIGHDWVNLNGNKVTVRAITVGIDVPRIIRSSGNVSVSEKLEELNKRYENMKVILGRDRLDELYGVPQKLRSFQRFLRTYPEWRKKVVLIQITISSAFKHPKLLSSIKKLVQAINQEFGTDDYTPVHHVEEQLEPADYFALLTRADALFINSIREGVSNLALEYVVCQRDRYGMVLLSEFTATSAMLHDVPLINPWDYNECAGIISYALSTPLERRKMIERASYKQVTTHTMQSWTSSLIRSLAYKLAATKTDQRIPTLTPEHALSVYSKASKRLFMMDYDGTLTPIVRDPNAAVPSKKLLDNLATLAADPKNQVWIISGRDQQFLRNWMDDIKGLGLSAEHGSFVRKPHSTTWINLAELLDMSWKKEVRRIFQYYTDRTQGSSIEEKRCAMTWHYRKADPREWSFQALECEALLEELVCSKYDVEIMRGKANLEVRPSSINKGGIVKQILSSYPEDSLPSFIFCAGDDRTDEDMFRSLHKNTRINKETSFAVTIGSDKKLSIADWCIETLQMLLISALVWRILLTE

SEQ ID NO: 1469 - protein, 1031 aa, Arabidopsis thaliana
MKLSFSLVFNALTLLLQVCIFAQARFSNETDMQALLEFKSQVSENNKREVLASWNHSSPFCNWIGVTCGRRRERVISLNLGGFKLTGVISPSIGNLSFLRLLNLADNSFGSTIPQKVGRLFRLQYLNMSYNLLEGRIPSSLSNCSRLSTVDLSSNHLGHGVPSELGSLSKLAILDLSKNNLTGNFPASLGNLTSLQKLDFAYNQMRGEIPDEVARLTQMVFFQIALNSFSGGFPPALYNISSLESLSLADNSFSGNLRADFGYLLPNLRRLLLGTNQFTGAIPKTLANISSLERFDISSNYLSGSIPLSFGKLRNLWWLGIRNNSLGNNSSSGLEFIGAVANCTQLEYLDVGYNRLGGELPASIANLSTTLTSLFLGQNLISGTIPHDIGNLVSLQELSLETNMLSGELPVSFGKLLNLQVVDLYSNAISGEIPSYFGNMTRLQKLHLNSNSFHGRIPQSLGRCRYLLDLWMDTNRLNGTIPQEILQIPSLAYIDLSNNFLTGHFPEEVGKLELLVGLGASYNKLSGKMPQAIGGCLSMEFLFMQGNSFDGAIPDISRLVSLKNVDFSNNNLSGRIPRYLASLPSLRNLNLSMNKFEGRVPTTGVFRNATAVSVFGNTNICGGVREMQLKPCIVQASPRKRKPLSVRKKVVSGICIGIASLLLIIIVASLCWFMKRKKKNNASDGNPSDSTTLGMFHEKVSYEELHSATSRFSSTNLIGSGNFGNVFKGLLGPENKLVAVKVLNLLKHGATKSFMAECETFKGIRHRNLVKLITVCSSLDSEGNDFRALVYEFMPKGSLDMWLQLEDLERVNDHSRSLTPAEKLNIAIDVASALEYLHVHCHDPVAHCDIKPSNILLDDDLTAHVSDFGLAQLLYKYDRESFLNQFSSAGVRGTIGYAAPEYGMGGQPSIQGDVYSFGILLLEMFSGKEPTDESFAGDYNLHSYTKSILSGCTSSGGSNAIDEGLRLVLQVGIKCSEEYPRDRMRTDEAVRELISIRSKFFSSKTTITESPRDAPQSSPQEWMLNTDMHTM

SEQ ID NO: 1470 - protein, 494 aa, Mycobacterium tuberculosis
MLEACQAIGVTAALGEPGEHSLPASTPITGDVLFSIAPTTPEQADHAIAAAAATFTAWRSTPAPVRGALVARLGELLTAHQQDLATLVTVEVGKITAEARGEVQEMIDVCQFSVGLSRQLYGRTIASERAGHRLLETWHPLGVVGVITAFNFPVAVWAWNTAVALVCGDTVVWKPSELTPLTALACQALLSRAAADVGAPAAVGGLLLGGAERGAQLVDDPRVALLSATGSVRMGQQVGPRVARRFGRVLLELGGNNAAIVAPSADLELAVRGIVFAAAGTAGQRCTSLRRLIVHRSVADDVVARVVGAYRQLAIGDPSAPDTLVGPLIHEAAYRDMVAALERARTDGGEVIGGDRREVGSPGAYYVAPAVVRMPSQTAIVATETFAPILYVLTYDDLDEAIALNNAVPQGLSSSIFTTDLREAEHFLDQSDCGIANVNIGTSGAEIGGAFGGEKQTGGGRESGSDAWKAYMRRATNTVNYSSELPLAQGVKFG

SEQ ID NO: 1471 - protein, 553 aa, Oryza sativa
MYRVKSESDCDMIHQEQMDSPVADDGSSGGSPHRGGGPPLKKGPWTSAEDAILVDYVKKHGEGNWNAVQKNTGLFRCGKSCRLRWANHLRPNLKKGAFTAEEERLIIQLHSKMGNKWARMAAHLPGRTDNEIKNYWNTRIKRCQRAGLPIYPTSVCNQSSNEDQQCSSDFDCGENLSNDLLNANGLYLPDFTCDNFIANSEALPYAPHLSAVSISNLLGQSFASKSCSFMDQVNQTGMLKQSDGVLPGLSDTINGVISSVDQFSNDSEKLKQAVGFDYLHEANSTSKIIAPFGGALNGSHAFLNGNFSASRPTSGPLKMELPSLQDTESDPNSWLKYTVAPALQPTELVDPYLQSPAATPSVKSECASPRNSGLLEELIHEAQTLRSGKNQQTSVISSSSSVGTPCNTTVLSPEFDMCQEYWEEQHPGPFLNDCAPFSGNSFTESTPPVSAASPDIFQLSKVSPAQSTSMGSGEQVMGPKYEPGDTSPHPENFRPDALFSGNTADPSVFNNAIAMLLGNDLSIDCRPVLGDGIMFNSSSWSNMPHACEMSEFK

SEQ ID NO: 1472 - protein, 226 aa, Oryza sativa
MAAAAQRLLAASTKIVGVGRNFVAHAKELGNPVPKEPVLFLKPTSSFLHAGVAGAAIEVPEPVESLHHEVELAVVISQRARDVPEASAMDFVGGYALALDMTARELQSAAKSAGLPWTLGKAQDTFTPISAVIPKSDVANPDDLELWLKVDDELRQKGSTSDMIFKIPSLISYISSIMTLMEGDVILTGTPEGVGPVRPGQKIKAGITGLIDVEFDVQKRKRSFST

SEQ ID NO: 1473 - protein, 1013 aa, Pyrococcus furiosus
MPAKGRIIRVTGPLVIADGMKGAKMYEVVRVGELGLIGEIIRLEGDKAVIQVYEETAGLKPGEPVEGTGSSLSVELGPGLLTSIYDGIQRPLEVLREKSGHFIARGISAPALPRDKKWHFTPKVKVGDKVVGGDIIGEVPETSIIVHKIMVPPGIEGEIVEIADEGEYTIEEVIAKVKTPSGEIKELKMYQRWPVRVKRPYKEKLPPEVPLVTGQRVIDTFFPQAKGGTAAIPGPFGSGKCVDGDTLILTKEFGLIKIKDLYEKLDGKGRKTVEGNEEWTELEEPITVYGYKNGKIVEIKATHVYKGASSGMIEIKTRTGRKIKVTPIHKLFTGRVTKDGLVLEEVMAMHIKPGDRIAVVKKIDGGEYVKLDTSSVTKIKVPEVLNEELAEFLGYVIGDGTLKPRTVAIYNNDESLLKRANFLAMKLFGVSGKIVQERTVKALLIHSKYLVDFLKKLGIPGNKKARTWKVPKELLLSPPSVVKAFINAYIACDGYYNKEKGEIEIVTASEEGAYGLTYLLAKLGIYATIRRKTINGREYYRVVISGKANLEKLGVKREARGYTSIDVVPVDVESIYEALGRPYSELKKEGIEIHNYLSGENMSYETFRKFAKVVGLEEIAENHLQHILFDEVVEVNYISEPQEVYDITTETHNFVGGNMPTLLHNTVTQHQLAKWSDAQVVVYIGCGERGNEMTDVLEEFPKLKDPNTGKPLMERTVLIANTSNMPVAAREASIYTGITIAEYFRDMGYDVALMADSTSRWAEALREISGRLEEMPGEEGYPAYLASRLAEFYERAGRVVTLGSDYRVGSVSVIGAVSPPGGDFSEPVVQNTLRVVKVFWALDADLARRRHFPAINWLTSYSLYVDAVQDWWHKNVDPEWRRMRDKAMELLQKEAELQEIVRIVGPDALPERERAILLVARMLREDYLQQDAFDEVDTYCPPQKQVTMMRVLMTFYERTMDAISRGVPLEEIAKLPVREEIGRMKFEPDIEKIRALIDKTNEQFDELLKKYGA

SEQ ID NO: 1474 - protein, 227 aa, Pyrococcus furiosus
MSFVRLPFRDSYYELRPTKIIALAKNYAEHAKEMGDNPPTEPIIFLKPPSALIGPGEPIILPKISKRVDHEVELGVIIGKKAKKVPAEKAFDYVLGYTIILDITARDLQEKARKMGHPWTVSKGFDTFAPVGPRIVDKRELDPSDLEIGLKVNGEVRQLGRTSQMIFKIPQLIEYISNIMTLEPGDIIATGTPPGVGSLRHGDHIEAWIEGIGKVEFDVLAEDSILC

SEQ ID NO: 1475 - protein, 344 aa, Pyrococcus furiosus
MLHEIPKEEILEKLKNIGAKKVLIQSPEGLRREAEELAEFLEKNEIEVILHGEINYGACDPADHEARLLGCDALIHLGHSFMMLSLEVPTIFVPAFAKVNVVEALKKNLHEIKKLGKKIIVTTTAQHIHQLERAIEYLKSQGFEPVVGRGDNRVSWPSQVLGCNFSVAKVEGDGILFIGSGTFHPLGLALATGKRVLAVNPYSGDCQWINELAERFIRKRWAQIAKAMDAKRFGVVISTKRGQLRLNEAKRIIKLLKDHGREAKLIAMNDISYSKLEGFSFDAYVIVACPRVPIDDYENWRKPVLTPREVEILLGLREEYIFDEIPGGVREKDEPLGISLHSTR

SEQ ID NO: 1476 - protein, 251 aa, Hordeum vulgare
MGRSPCCEKEHTNKGAWTKEEDQRLIAYIRANGEGCWRSLPKAAGLLRCGKSCRLRWMNYLRPDLKRGNFTDDEDELIIRLHSLLGNKWSLIAGQLPGRTDNEIKNYWNTHIKRKLLSRGMDPHTHRPLTAVIDAAAPTRPAQIAVPARAAPTTMFALPTKQQQPPVPVESSDDDGSSGATSTGEPRCPDLNLDLSVGPPAADTPTSHPVCLCRHLGFRGGEACSCRQADSAGSQGGGFRYFRPLEEGQYI

SEQ ID NO: 1477 - protein, 162 aa, Sorghum bicolor
MGRQPCCAKVGLKRGPWTVEEDQKLVTFLLTNGHCCWRAVPKLAGLLRCGKSCRLRWTNYLRPDVKRGLLSSEEERTVIDLHEQLGNRWSKIASQLPGRTDNEIKNHWNTHIKKKLRKMGIDPVTHKPLHQPASPPPPPPLTRQEQEEKDTRGSPKKKRRRR

SEQ ID NO: 1478 - protein, 580 aa, Schizosaccharomyces pombe
MSEMEKQVENLSLEAKNEKPKEVILGEDGKPLSKKALKKLEKEREKEQKRKEREAREAEEKKKREANEIDYSAGKYGDLPLNRSTARPGRTYTQISDISAKNDGQTVLLRARVYTSRLQGNKMCFFSLRQKYDTIQALAVVNKDTISKQMVKWCGSISLESIVLVEGIVKKSPEIIKSATVQDAEIHISSIYVISPIKKNLPFLVEDAGRSEEQIRESEENAAEGDSKFVRVNLDTRLDNRVLDLRTPTNQAIFDIQAGICQAFREFLLSNSFNEIHTPKMSGASSEGGSNVFKIQYFKTDGFLSQSPQLYKQMLIAADRERVFEIGPVFRAEDSNTYRHMTEFTGLDLEMAFNEHYHEVMEFIEKLFLYIFKTIREKYAKQVAVVRQQYPSEDFILPDADRIRFHFKDAVKLLKEAGYRKQLVPGQKVPEDEEFHYCEDPEFDDFSTPEERALGQIVREKYHTDFYVIDKYPSSVRPFYTMPDPEDPRYSNSYDFFMKGQEIMSGAQRIHDPELLVERMKALGVSPDVGLQQYIDAFAIGCPPHAGGGIGLERVVMFYLNLPNIRLASSFPRDPKRLLP

SEQ ID NO: 1479 - protein, 179 aa, Schizosaccharomyces pombe
MGGARFINFIKPLSSLLPEVEGPKTHLELVEKLGWMAGCVVVYQILSIIPVYGAEKTDTLDPINNFRVLDGSSASGLMITGLAPIYLSSFLLQILASKKKIAVNFNLIIDRVLFQNAQKVVSALLYLILAVTYVSSGYYGSFSDLGIFRFIMLILQIFLPGIVCIYLCEIIEKGHGLGS

SEQ ID NO: 1480 - protein, 436 aa, Schizosaccharomyces pombe
MAEVKKSIPKRRFVGKKNRKENNLDGSNRDVENAALVTINSKRSAGRVATQIPEDILNDKAINEAIKLLPQNYNFEIHKTIWHIRLRKAKRVALQLPEGLLMFGCILSDIFEQFCQVETIVMGDVTYGACCIDDFTARALDCDFLVHYGHSCLIPVDQTPIKVLYVFVDIKIDLQHVVSSLKHNLPSNSRLALVGTIQFVGSLNSIKDALQIQDEDGKGGFYVVIPQAKPLSPGEALGCTSPYIEKGSVDALIYIGDGRFHLESVMIANPDLPAYRYDPYSHKLSIESYAHEEMKSIRYSAVEKARTAKKFGLIQGTLGRQGSPKVLENLKNTLRKNNKDFVCVLMSEIFPSRLGQFSDIDAWIQVACPRLSIDWGYAFPAPLLTPYEASAAFNVVPWKEVYPMDFYATNSLGNWTPNNPENRPLPNRKKTGPVSS

SEQ ID NO: 1481 - protein, 817 aa, Schizosaccharomyces pombe
MSVYGKIPSTSFEHENTFELSGDLLDPEELKSLGVSGRIIYVLRHLPFKSSINEETREWDLSGRRGATTMYSSMNWLANSTYWQTTLVGWTGVIPTVSEKEENKDAVTRLDSQDVKRFEETYSQWNSGERSTEYVPVWLPGPEKGSETIINETRSQQSRWLAYAENVIRPLIHYKYWPSSEVDENEEQWWRDYVKMNHAFADKICEIYKPGDFIIVQDYSLFLVPQLIRNKIDDAVIGFYHHHPFPSSEIARCFPRRRAILRSVLGADFIGFEDYSYARHFISCCSRVLDLEIGHDWVNLNGNKVTVRAITVGIDVPRIIRSSGNVSVSEKLEELNKRYENMKVILGRDRLDELYGVPQKLRSFQRFLRTYPEWRKKVVLIQITISSAFKHPKLLSSIKKLVQAINQEFGTDDYTPVHHVEEQLEPADYFALLTRADALFINSIREGVSNLALEYVVCQRDRYGMVLLSEFTATSAMLHDVPLINPWDYNECAEIISNALSTPLERRKMIERESYKQVTTHTMQSWTSSLIRSLANKLAATKTDQRIPTLTPEHALSVYSKASKRLFMMDYDGTLTPIVRDPNAAVPSKKLLDNLATLAADPKNQVWIISGRDQQFLRNWMDDIKGLGLSAEHGSFVRKPHSTTWINLAELLDMSWKKEVRRIFQYYTDRTQGSSIEEKRCAMTWHYRKADPENGAFQALECEALLEELVCSKYDVEIMRGKANLEVRPSSINKGGIVKQILSSYPEDSLPSFIFCAGDDRTDEDMFRSLHKNTRINKETSFAVTIGSDKKLSIADWCIADPANVIDILADLANFTN

SEQ ID NO: 1482 - protein, 572 aa, Schizosaccharomyces pombe
MKDNQQAVQLQQPTTIGHYLAVRLAQAGVKHHFVVPGDYNLGLLDKLQYNNYLEEVNCANELNCAFAAEGYARANGIAACVVTYSVGAFTAFDGIGGAYAEDLPVILISGSPNTNDIGSSHLLHHTLGTHDFSYQYEMAKKITCAAVSIQRPTEAPRLIDYAIKMALLKKKPVYIEVPTNVASQPCAAPGPASLITEPETSNQEYLQMAVDISAKIVNGKQKPVLLAGPKLRSFKAESAFLELANSLNCSVAVMPNAKSFFPESHPNYAGIYWGQASTLGAESIINWSDCIICAGTTFTDYSSNGWTSLPPKANVLHVDVDRVTVSDAEFGGVLLRDFLHELAKKVKANNASVVEYKRIRPESLEIPMENPKAALNRKEIIRQVQNLVNQETTLFVDTGDSWFGGMRITLPEKARFEIEMQWGHIGWSVPSAFGYAIGAPKRNVVVFVGDGSFQETVQEVSQMVRLNLPIIMFLINNRGYTIEVEIHDGPYNRIKNWDYAAIVEAFNAGEGHAKGFRVGNGHELAEAIRQAKENSQGPTLIECNIDQDDCSKELINWGHNVGAANGKPPAKE

SEQ ID NO: 1483 - protein, 328 aa, Lycopersicon esculentum
MAVNGASSSGLIVSFGEMLIDFVPTVSGVSLAEAPGFLKAPGGAPANVAIAVTRLGGKSAFVGKLGDDEFGHMLAGILKTNGVQAEGINFDKGARTALAFVTLRADGEREFMFYRNPSADMLLTPAELNLDLIRSAKVFHYGSISLIVEPCRAAHMKAMEVAKEAGALLSYDPNLRLPLWPSAEEAKKQIKSIWDSADVIKVSDVELEFLTGSNKIDDESAMSLWHPNLKLLLVTLGEKGCNYYTKKFHGTVGGFHVKTVDTTGAGDSFVGALLTKIVDDQTILEDEARLKEVLRFSCACGAITTTKKGAIPALPTASEALTLLKGGA

SEQ ID NO: 1484 - protein, 332 aa, Beta vulgaris
MPAVYGDRMTTFEDSEKESEYGYIRKVSGPVVVADGMNGAAMYELVRVGHDNLIGEIIRLEGDSATIQVYEETGGLTVNDPVLRTHKPLSVELGPGILGNIFDGIQRPLKTIAKRSGDVYIPRGVSVPPLDKDTQWDFQPKKLGVGDLLTGGDLYAIVDENSLMQHHVALPPDAMGKITYIAPAGNYTIQDTVLELEFQGVVKKFTMLQTWPVRTPRPVASKLAADTPLLTGQRVLDALFPSVLGGTCAIPGAFGCGKTVISQALSKYSNSDAVVYVGCGERGNEMAEVLMDFPQLTMTLPDGREESVMKRTTLVANTSNMPVAAREASIYT

SEQ ID NO: 1485 - protein, 718 aa, Oryza sativa
MVGIDLNTVEEEEDEEEGGATGTVTAPAEARAGGAVCLELWHACAGPVAPLPRKGSAVVYLPQGHLEHLGAAPGSGPGAAVPPHVFCRVVDVSLHADAATDEVYAQVSLVADNEEVERRMREGEDGAACDGEGEDAVKRPARIPHMFCKTLTASDTSTHGGFSVPRRAAEDCFPPLDYSLQRPFQELVAKDLHGTEWRFRHIYRGQPRRHLLTTGWSGFINKKKLVSGDAVLFLRGEDGELRLGVRRAAQLKNASPFPALHNQISNTSSLSEVAHAVAVKSIFHIYYNPRLSQSEFIIPYWKFMRSFSQPFSVGMRFKLRYESEDASERRRTGIIIGSREADPMWHGSKWKCLVVKWDDDVECRRPNGVSPWEIELSGSVSGSHLSTPHSKRLKSCFPQVNPDIVLPNGSVSSDFAESARFHKVLQGQELLGLKTRDGTVNTASQATEARNFQYTDERSCSINMSNNILGVPRLGVKTPSGNPGFSYHCSGFGESQRFQEVLQGQEVFRPYRGGTLSDACIRGSGFRQPDGNHAPGAAFKWLAPQGCDHHGITTSVLPQASSPSSVLMFPQTSSKMPGLEYIYGCLDRNENSRHFKIGPTQDMTRTDQTLRLWPHLISGKVLDECTRNEKLHSPVSGAEHESNNKCLNTNGCKIFGISLTEKAQAGDEVDCGNASYHSRLQSLKPQMPKSLGSSCATVHEQRPVVGRVVDISAVNTMI

SEQ ID NO: 1486 - protein, 819 aa, Oryza sativa
MAGLVIGYLAVQLSLMSLLLCPSSSTAQHTLGRSSMSVEDHARPFLVSTDGSFSCGFLEAGDNAFTFSVWFTADPNRTAVWSANRDAPVNGRGSRVSFSRDGELALADTNGTTVWSSKTTAGTGNRRGLTVSLRDTGNLVVGDPSTGLAVWQSFEWPTDTLLPSQRFTKQTKLVAGYFSLYFDNDNVLRMLYDGPEIASIYWPLPGLTVFENGRTNYNSTRIAILDDAGVFLSSDQTKAEATDLGLGIKRRITIEQDGNLRMYSLNASTGGWAVTWSALKQPCQAHGLCGKNGLCEYLPSLRCSCLPGYEMVDRRDWRRGCKPTFPVGNCSQGSAPPPSPATAPPQFKFIEVAQTDFFGFDLGYTESITFKQCRDQCMNNCQCTAFSYRLDGRGKCYPKGTLFNGFTSANFPGSIYLKVPLDFNASSPRVSAQRAAGLACGANVTVVTVSADVYGMAPGSNGQWTYFFVFAGVLGVLDILFIATGWWFLSSKQSIPSSLQAGYKMVMTSQFRRFTYRELKGATANFKEELGRGGSGAVYRGVLDGGKVVAVKRLAVDVTMQGDEEFWSEMTVLGRINHINLVRIWGFCSERKHKLLVYEYVENQSLDRHLFDASDGSGGKATTLAWSDRYKIALGTARGLAYLHHECLEWVIHCDVKPENILLTREFEAKIADFGLAKLSKRDGGAGVELTHMRGTSGYMAPEWALNLPINAKVDVYSFGIVLLEMVVGSRVADQRTEAGEPLQLPQITQALRHVVDSGDVMSLVDARLQGQFNPRQAMEMVRISLACMEERSCRPTMDDIAKSLTAFDDEDEHPAYHS

SEQ ID NO: 1487 - protein, 814 aa, Oryza sativa
MAGLVIGCLAVQLSLASLLLCSSASTAQHTLGTGSSLSVADRSRPFLVSPDGTFSCGFIQAGDDGDNAFSFSVWFTAARDGAVVWTANPDAPVNGRGSTISFRHDGELALADTNGTTVWASRTGGGGRGLTVSLRDTGNLVIEDPSTGRAVWQSFDWPTDTLLPSQRFTKDTKLVAGYFSLYYDNDNVLRMLYDGPEIASIYWPLPGVSIFDFGRTNYNSSRIAILDDAGVFRSSDRLQAQASDMGVGVKRRLTIEQDGNLRIYSLNASTGGWAVTWAALSQPCQAHGLCGKNGLCVYLPSLRCSCPPGYEMIDRRDWRKGCQPMFSVGNCSQPAAPERFKSVVVPQTDFYGYDLMFNGSSITFELCRNQCLSDCQCVAFSYRFDGVGRCFTKGRLFNGYTSANFPGNIYLKVSIDFDESSPLVSARSAAGLTCNPNVSIVTVPAAVYGMAPRNSGKWTYLFVFAGVLGVLDLLFIATGWWFLSSKQSIPSSLEAGYRRVMTSQFRRFTYRELKDVTANFKEELGRGGSGVVYRGVLDGGKVVAVKRLAVDVTMQGDEEFWAEMTVLGRINHMNLVRIWGFCSERKHKLLVYEYVENQSLDRHLFDTAEGGGGMSTTTLAWKDRYKIALGTARGLAYLHHECLEWVIHCDMKPENILLTRDFDAKIADFGLAKLSKRDGGAGVELTHMRGTSGYMAPEWALNVPINAKVDVYSFGIVLLEIVVGSRVADQRTEAGERLQLPQIAQALRHVLDSGDVRSLVDARLQGQFNPRQAMEMVRISLACMEDRNSRPTMDDIAKALTAFDDEDEHPAYRS

SEQ ID NO: 1488 - protein, 778 aa, Oryza sativa
METIPCLILFSSLQILAFSSASPEHTLGTGSFLSVEEYEKPFLISPSNTFSFGFYETGDNAFSLSIWFTNTVEKTVVWAANSESPVNGHGSKLSFTQEGSLVLSDEKGFVVWDSKTMLGQDSRVALLDTGNLVITDSKGSVVWQSFDSPTDTLLPLQLLTKDKRLVSGYYSLYYDTDNVLRLIYNGPEISSPYWPNPSESIFDFGRTNYNSSRIGVLDNTGHFTSSDGLNIIASDSGLGINRRLTIDQDGNLKLYSLNKVEKSWIVTWEAMPQHCDVHGLCGRNSICEYSPGPRCSCLPGYEMADLENWSKGCQPMFTNNYGQAIGQVIFVEMRHVEFYGYDTGFNISVSLEDCEEFCSQQRSCVAYSYHAGSGYCYTKGMLYNGRKTQSITGSTYFKLPKTCNISEVKQHGLTCRHSHSTYEMHRQHGKWLYFYTCAAIFGGLELFFTTTACLFLRSKQNIPKSVMDGYELMTEHFRKFSYRELKEATGNFKEELGRGGSGVVYRGVLDRKKVVTVKRLTNATEAEEEFQSEISVIGRINHVNLVRTWGYCSEGKHKLLVYDYVENESLDKHLFESIDAKKLLRWNQRFTIALGTARGLAYLHHECLEWVVHCDVKPENILLTQDFEVKIADFGLAKLSKRDCSCLQLSHMRGTVGYMAPEWALNLPINAKVDVFSYGIVLLEIVMGARISSQTTTEGEKLDLTQIVEALKQVVACGDVTHIVDAKLHGQFNHLQAMEMVKISLSCIGERTKRPTMDEITKALMACGDEDKYADCTE

SEQ ID NO: 1489 - protein, 648 aa, Lolium perenne
MESRSIPGAYAYEPLPHSSDDAHGHDDRRSAGGVRWRACAAVLAASALVVFVVASTLAGSRVDRVAVDVAAMPALSETARSRGKDAGVSEKTSGAADEMGFLGAGSGADADGFPWSNAMLQWQRTGFHFQPEMNWMNDPNGPVYYRGWYHLFYQYNPEGAVWGNIAWGHAVSRDLVHWRHLPLAMVPDQWYDINGVWTGSATVFPDGTLNMLYTGSTNASVQVQCLAVPEDPNDSLLRNWTKHEANPVLLPPPGIGDKDFRDPTTAWFDESDQTWRTVIGSKDNNGHAGIAMVYKTKDFLNYELIPGYLHRVDGTGMWECIDFYPVGGKNGSEELYVIKESSDDDRHDWYTLGKYDAAANTFTAADPENDLGIGLRYDWGKFYATKTFYDPAKNRRVLWGWIGETDSERADVAKGWASLMSIPRTVELDEKTRTNLIQWPVEELETLRIKSTDLGGVTIDHGSVYPLPLHRATQLDIEASFRIDTATVAALNEADVGYNCSTSGGSANRGALGPFGLLVLADGKAEQTAVYFYVAKGLDGTLQTHFCHDESRSTLARDVVKRVVGYTVPVLDGEAFSVRVLVDHSIVESFAMGGRSTATSRVYPTEAIYGAAGAYLFNNATGGSVTVEKLVVHEMDSSYNQIFMADDL

SEQ ID NO: 1490 - protein, 247 aa, Malus x
SSFLSVQPQQSSMGDIVWGHAVSKDLIHWLHLPLAMVADQWYDINGVWTGSATILPDGKIVMLYTGSTNESVQVQNLAYPADHSDPLLLNWVKYSGNPVLVPPPGIGYKDFRDPTTAWFTSEGKWRITIGSKLNKTGMSLVYDTKDFKTYELLNGVLHAVPGTGMWECVDFYPVSKTSDKGLDTSVNGPDVKHVVKASLDDDRNDYYAFGTYDEKTGKWVPDNEKIDVGIGIRYDYGKFYASKTFFD

SEQ ID NO: 1491 - protein, 235 aa, Melaleuca alternifolia
MADAAADAGMDAVQRRLMFEDECILVDQNDNVVGHESKYNCHLMEKIESLNLLHRAFSVFLFNSKYELLLQQRSATKVTFPLVWTNTCCSHPLYRESELIAENALGARNAAQRKLLDELGISAEDVPVDEFIPLGRILYKAPSDGKWGEHELDYLLFIVRDVKVNPNPDEVADIKYVNREQLKELLRKADAGEGGLKLSPWFRLVVDNFLFKWWDHVEKGTLKEAADMKTIHKLT

SEQ ID NO: 1492 - protein, 226 aa, Melaleuca alternifolia
MDAVQRRLMFEDECILVDENDQVVGHESKYNCHLMEKIEKENLLHRAFSVFLFNSKYELLLQQRSATKVTFPLVWTNACCSHPLYRESELIDDNALGVRNAAQRKLLDELGIPADDLPVDQFIPLTRMLYKAPSDGKWGEHELDYLLFIVRDVSVHPNPDEVADVKYVNREQLKELLRKVDGGEEGLKLSPWFRLVVDNFLFKWWDHVEKGTLKEVVDMEKIHKLT

SEQ ID NO: 1493 - protein, 425 aa, Brassica rapa
TSFLLVFVVMILFRPTLSIYFNTLSSTESLTISNSRTLVSPGDVFELGFFKTTSSSRWYLGIWYKKLPGRTYVWVANRDNPLSNSIGTLKISNMNLVILDHSNKSVWSTNHTRGNERSLVVAELLANGNFLMRDSNSNDAYGFLWQSFDYPTDTLLPEMKLGYDLKIGLNRSLTSWRSPDDPSSGYFSYKLEGSRRLPEFYLMQGDVREHRSGPWNGIQFIGIPEDQKSSYMMYNFTDNSEEVAYTFVMTNNGIYSRLKLSSDGYLERLTWAPSSGAWNVFWSSPNHQCDMYRMCGTYSYCDVNTSPSCNCIPGFNPKNRQQWDLRIPISGCKRRTRLSCNGDGFTRMKNMKLPDTTMAIVDRSMGVKECEKRCLSDCNCTAFANADIRNGGTGCVIWTGELEDMRNYAEGGQELYVRLAAADLG

SEQ ID NO: 1494 - protein, 467 aa, Oryza sativa
MGGAEDAPRAAAANGHGNGATVEEKLDELRRLLGKADGDPLRIVGVGAGAWGSVFCALMQDAYGHLRDKVQVRIWRRPGRAVDRATAEHLFEVINAREDVLRRLIRRCAYLKYVEGRLGDRTLYADEILRDGFCLNMIDTPLCPLKVVTNLQEAVWDADIVINGLPSTDTREVFGEIGRYWKERITAPIILSLAKGIEASLDPLPRIITPTQMISNATGVPLENILYLGGPNIASEIYNKEYANARICGADKWRKPLAKFLRQPHFIVWDNSDLITHEVMGGLKNVYAIGAGMVAALTNESATSKSVYFALCTSEMIYITHLLEEEPEKLAGPLLADTYVTLLKGRNAWYGQKLAKGELTLEMGDSIKGKGTIQGVSAVNAFYELLSQDSLSVMHPEANRSVAPVEMCPILKALYKILIKRELPPDSILQAIRDETMYDPRERIEMAQGHSLYRPSLLGQPKGDAKA

SEQ ID NO: 1495 - protein, 234 aa, Hordeum vulgare
MGRGRIEIKRIENTTNRQVTFCKRRNGLLKKAYELSVLCDAEVALVVFSSRGRLYEYSNNSVKATIERYKKANSDTSNSGTVAEVNAQYYQQESSKLRQQISSLQNSNSRSLVRDSVSTMTLRDLKQLEGRLEKGIAKIRARKNELMYAEVEYMQKREMELHNDNIYLRSKVSENERGQQPMNMMASGSTSSEYDHMVAPYDSRNFLQVNMQQQQHYSQQLQPTALQLGQQYFN

SEQ ID NO: 1496 - protein, 338 aa, Arabidopsis thaliana
MARIGSFLIILYLIYALTLCICDDDESNYGGDKGNLFPGFYRSSCPRAEEIVRSVVAKAVARETRMAASLMRLHFHDCFVQGCDGSLLLDTSGSIVTEKNSNPNSRSARGFEVVDEIKAALENECPNTVSCADALTLAARDSSVLTGGPSWMVPLGRRDSTSASLSGSNNNIPAPNNTFNTIVTRFNNQGLDLTDVVALSGSHTIGFSRCTSFRQRLYNQSGNGSPDRTLEQSYAANLRQRCPRSGGDQNLSELDINSAGRFDNSYFKNLIENMGLLNSDEVLFSSNEQSRELVKKYAEDQEEFFEQFAESMIKMGNISPLTGSSGEIRKNCRKINNS

SEQ ID NO: 1497 - protein, 297 aa, Arabidopsis thaliana
MDQYEKVEKIGEGTYGVVYKARDKVTNETIALKKIRLEQEDEGVPSTAIREISLLKEMQHSNIVKLQDVVHSEKRLYLVFEYLDLDLKKHMDSTPDFSKDLHMIKTYLYQILRGIAYCHSHRVLHRDLKPQNLLIDRRTNSLKLADFGLARAFGIPVRTFTHEVVTLWYRAPEILLGSHHYSTPVDIWSVGCIFAEMISQKPLFPGDSEIDQLFKIFRIMGTPYEDTWRGVTSLPDYKSAFPKWKPTDLETFVPNLDPDGVDLLSKMLLMDPTKRINARAALEHDTSRILEACLRKA

SEQ ID NO: 1498 - protein, 607 aa, Fusobacterium nucleatum
MSKIIGIDLGTTNSCVAVMEGGSATIIPNSEGARTTPSVVNIKDNGEVVVGEIAKRQAVTNPTSTVSSIKTHMGSDYKVEIFGKKYTPQEISAKTLQKLKKDAEAYLGEEVKEAVITVPAYFTDSQRQATKDAGTIAGLDVKRIINEPTAAALAYGLEKKKEEKVLVFDLGGGTFDVSVLEISDGVIEVISTAGNNHLGGDDFDNEIINWLVAEFKKETGIDLSNDKMAYQRLKDAAEKAKKELSTLMETSISLPFITMDATGPKHLEMKLTRAKFNDLTKHLVEATQGPTKTALKDASLEANQIDEILLVGGSTRIPAVQEWVENFFGKKPNKGINPDEVVAAGAAIQGGVLMGDVKDVLLLDVTPLSLGIETLGGVFTKMIEKNTTIPVKKSQVYSTAVDNQPAVTINVLQGERSRATDNHKLGEFNLEGIPAAPRGVPQIEVTFDIDANGIVHVSAKDLGTGKENKVTISGSSNLSKEEIERMTKEAEAHAEEDKKFQELVEARNKADQLISATEKTLKENPDKVSEEDKKNIEAAIEELKKVKDGDDKSAIDSAMEKLSQASHKFAEELYKEVQAQAQAQQQAGANAGSDKKDEDVAEAEVVD

SEQ ID NO: 1499 - protein, 413 aa, Fusobacterium nucleatum
MKRVVVTGLGLISSLGIGLEESWKKLIDGETGIDLITSYDTTDQPVRIAGEVKGFEPTDYGIEKKEVKKLARNTQFALIATKMALEDANFKIDETNADDVGVLVSAGVGGIEIMEEQYKNMLEKGPKRISPFTIPAMIENMAAGNIAIYYGAKGPNKSIVTACASGTHSIGDGFDLIRHGRAKAMIVGGTEASVTKFCINSFANMKALSTRNETPKTASRPFSKDRDGFVMGEGAGILILEELESALARGAKIYAEMVGYGETCDANHITAPIETGEGATKAMRAALKDANIPLEDVTYINAHGTSTPTNDVVETRAIKALFGDKAKDLYISSTKGATGHGLGAAGGIEGVIIAKAIADGIIPPTINLHETEEECDLNYVPNKAIKTDVKVAMSNSLGFGGHNSVIVMKKFEK

SEQ ID NO: 1500 - protein, 475 aa, Fusobacterium nucleatum
MRSLKKTKIVCTIGPVTESVETLKELLNRGMNVMRLNFSHGDYEEHGMRMKNFRQAMSETGIRGGILLDTKGPEIRTMTLKDGKDVSIKAGQKFTFTTDQSVVGDNERVAVTYENFAKDLKVGNMVLVDDGLLELDVVEIKGNEVICIARNNGDLGQKKGINLPNVSVNLPALSEKDIEDLKFGCQNNVDFVAASFIRKADDVRQVRKVLRENDGERIQIISKIESQEGLDNFDEILAESDGIMVARGDLGVEIPVEEVPCAQKMMIRKCNRVGKTVITATQMLDSMIKNPRPTRAEANDVANAILDGTDAVMLSGETAKGKYPLAAVEVMNKIAKKVDATIPPFYIEGVINKNDITSAVAEGSADISERLNAKLIVVGTESGRAARDMRRYFPRAHILAITNNEKTANQLVLSRGIISYVDASPKTLEEFFVVAESVAKKLNLVKNNDIIIATCGESVFIQGTTNSIKVIQVKA

SEQ ID NO: 1501 - protein, 591 aa, Streptococcus pyogenes
MNQGKIITVSGPLVVASGMQEANIQDICRVGHLGLVGEIIEMRRDQASIQVYEETSGIGPGEPVVTTGCPLSVELGPGLISEMFDGIQRPLDRFQKATDSDFLIRGVAIPSLDRKAKWAFIPKLSVGQEVVAGDILGTVQETAVIEHRIMVPYKVSGTLVAIHAGDFTVTDTVYEIKQEDGSIYQGSLMQTWPVRQSRPVAQKLIPVEPLVTGQRVIDTFFPVTKGGAAAVPGPFGAGKTVVQHQIAKFANVDIVIYVGCGERGNEMTDVLNEFPELIDPNTGQSIMERTVLIANTSNMPVAAREASIYTGITIAEYFRDMGYSVAIMADSTSRWAEALREMSGRLQEMPGDEGYPAYLGSRIAEYYERSGRVRTLGSQEREGTITAIGAVSPPGGDISEPVTQNTLRIVKVFWGLDAPLAQRRHFPAINWLTSYSLYQDDVGSYIDRKQQSNWSNKVTRAMAILQREASLEEIVRLVGLDSLSEQDRLTMAVARQIREDYLQQNAFDSVDTFTSFPKQEAMLTNILTFNEEASKALSLGAYFNEIMEGTAQVRDRIARSKFIPEENLEQIKGLTQKVTKEIHHVLAKGGI

SEQ ID NO: 1502 - protein, 670 aa, Lolium perenne
  misc_feature (69)..(69): Xaa can be any naturally occurring amino acid
MPMEARDGVSMPYSYAALPEDAEAAVVGRGRRTGPLFAALLLTLVAALLAVAALAGVRLVGELPAGGVXMPNHPMEVMDVSGSRGPESGVSEKTSGAASESGGMLGADAGSNAFPWSNAMLQWQRTGFHFQPEKNWMNDPNGPVYYKGWYHLFYQYNPEGAIWGNKIAWGHAVSRDMLRWRHLPIAMFPDQWYDINGAWSGSATVLPDGRIVMLYTGSTNASVQVQCLAFPSDPSDPLLTNWTKYEGNPVLYPPPHVGEKDFRDPTTAWYDGSDGMWRIVIGSKDNRRAGMALTYKTKNFHDFELVPGVLHRVPATGMWECIDLYPVGGARGIDMTEAVAAASNSGGGEVLHVMKESSDDDRHDYYALGRYDAATNKWTPLDADADVGIGLRYDWGKFYASKTFYDPAKKRRVLWGWVGETDSERADVAKGWASLQSIPRTVVLDTKTGSNLIQWPVVEVETLRTNSTNLGSIIVEHGSVFPLSLHRATQLDIEASFRLDPLDVAAAKEADVGYNCSTSGGAAGRGALGPFGLLVLADARRHGGDTEQTAVYFYVARGLDGNLRTHFCHDESRSSRANDIVKRVVGNIVPVLDGEALSVRVLVDHSIVESFAQGGRSVVTSRVYPTEAIYANAGVYLFNNATGARVTATSLVVHEMDPSYNQNQAEMASL

SEQ ID NO: 1503 - protein, 431 aa, Methanopyrus kandleri
MLKDAYTADVTPERDGEEVRLAGWVHEVRDLGGIKFVLLRDRTGIVQLTLPKQKVPKETFEKVPKLTKESVIRVEGTVQANEKAPGGVEVIPQRIEVLSESDTHLPLDPTGKVDADLDTRLDARVLDLRREEPQAIFKIRNVVTTAIREFLEERGFIEVHTPKIIASATEGGTELFPVVYFERDAYLAQSPQLYKQMLMAAGFERVYEIGPIFRAEEHNTRRHLNEAISVDIEMSFIESEEDVMRVLEELLAHVFRKVREECEKELEALDRELPELETPFERITYEETLDLLSEHGIEVEWGEDLPTEAERKLGEIFEEPFFITEWPRETRPFYTMAKDDEVTTAFDLMYQGLELASGAQREHRYDVLVRQIEEQGLSPEDFRHYLEAFKYGMPPHGGWGLGLERTLMTITGAENIREVTLFPRDRKRLHP

SEQ ID NO: 1504 - protein, 592 aa, Methanopyrus kandleri
MSNSVKGEIVKIAGPVVEAVGCEGAKMYEVFRVGDEGLIGEVINIESDRATIQVYEETTGLQPGEPVKGTGELLSVELGPGLLTQIFDGIQRPLPEIRKEVGDFVERGILVSALDRKKKWEFTPKVKEGEKVEEGDVLGTVPETEFIEHKIMVPPGVSGEVIEIAADGEYTVEDTIAVIEDEEGEEHEVTMMQEWPVRKPRPYKRKLDPEEPLITGQRVIDTFFPVAKGGTAAIPGPFGSGKTVTQQQLAKWADAQVVVYIGCGERGNEMTEVLEDFPELEDPRTGRPLMERTILVANTSNMPVAAREACIYTGITMAEYYRDMGYDVALMADSTSRWAEALREISGRLEEMPGEEGYPAYLASRLAEFYERAGRVVCLGSDDRVGSVTVVGAVSPPGGDFSEPVTQNTLRIVKVFWALDSKLADRRHFPAINWLQSYSLYLDDVEKWWHEEIGGDWRELRDEAMEILQRESELEEIVQLVGPDALPESERLILEVARMIREDFLQQNAFHEVDTYCPPEKQYEMLKTILHFKERAEEAVDKGVPVDEILKLDVIDDIARMKVIPNEEAKEKIQEIRKKIDEQFEELIEEAS

SEQ ID NO: 1505 - protein, 646 aa, Cichorium intybus
MMASLSDVENSITTSTLPYSYAPLPNGEQPAGNDRPVHSSRKTALFLVSVFLAVASLVALFAGNGPVLPKNLNTSAVPSTAGMPEKVAPLSRGVEKGVSEKSFHPLLGADNSFPWSNNMLDWQRTAFHFQPKKNWMNDPNGPVFYNGWYHLFYQYHPDAPVWGKIVWGHAVSKDLINWRHLPIAMETDEWYDEQGVWTGSATILPNGELVVLYTGSTNESVQVQNLAYPADPSDPLLIKWVKYPGNPVLVPPPGIDNKDFRDPTTAWKTPEGKWRITIGSKINKTGISLVYDTEDFKTFELLDGLLHAVPGTGMWECVDFYPISKQGENGLDTSVDGPGVKHVVKASMDDDRNDYYAIGTYDAYKGKWTPDNPTLDVGIGLRYDYGIYYASKTFYDQNKQRRVLWSWIKETDTEASDIKKGWASLMGVPRTIVLDKKTQSNIIQWPVEEINLLRTNLTVFKTVVVESGSLVPLNLPSASQLDIVAEFEVDKKTVERLNGADIAYDCAKNGGAAQRGALGPFGFSVLAHEGLAEHTPVYFYVAKGVDGNLQTFFCADQSRSSNANDVDKSIYGSIVPVLKGEKLAMRILVDHSIVESFAQEGRTCITSRVYPTKAINNNAQLFLFNNATATKVTASVNVWQMNSAHV

SEQ ID NO: 1506 - protein, 335 aa, Methanosarcina acetivorans
MSLGISEAFDLRPDYIISVIKDTKAKLVGFQFPEGLKRKGPELAKIVEEATGAEVLISGDPCFGACDLDRTLLDHVELLFHFGHAELEDVRLSDKVYFIETRSSVDVRPVVEKALPGLKGEKIGLITTVQHVHKLHDVCRVLEAGGKTCVIGRGDSRLAYAGQVLGCNFSAARDEVCDEYLYIGSGDFHPLGVALSTKKRVLAADPFSGEVREVDPSRILRQRSAVIAKSLDAQVFGIIVSSKNGQMRMELASSLKEIAKKHGKEAHLILIDLVTPDQLLQFKVDAFVNTACPRLAVDEVGRFPSPMLTPQEFEIVLGEREWEKLVLDEITEEPV

SEQ ID NO: 1507 - protein, 186 aa, Nicotiana tabacum
MASTLSTITLRSPSPSTASSTHASIPFPKKALEFPIRTPKLHHRRATFLRPLAAVEAPEKVVQLGDEISNLTLADAQKLVEYLQDKLGVTAASFAPAAVAAAPGAAAEAPAVVEEKTEFDVVIDEVPSNARIATIKAVRALTSLALKEAKELIEGLPKKFKEGVSKDEAEDAKKQLEEAGAKVSIA

SEQ ID NO: 1508 - protein, 191 aa, Nicotiana tabacum
MASTLSTITLRSPSPSTASSTHASIPFPKKALEFPIRTPKLHHRRATFLRPLAAVEAPEKVVQLGDEISNLTLADAQKLVEYLQDKLGVTAASFAPAAVAAAPGAAAEAPAVVEEKTEFDVVIDEVPSNARIATIKAVRALTSLALKEAKELIEGLPKKFKEGVSKDEAEDAKKQLEEAGAKVSIANLNFW

SEQ ID NO: 1509 - protein, 290 aa, Juglans nigra
MDQYEKVEKIGEGTYGVVYKARNRKTNQTLALKKIRLEQEDEGVPSTAIREISLLKEMQHGNIVKLQDVVHGEKRLYLVFEYLDLDLKKHMDSSPEFANDLRQIKMFLHQILRGIAYCHSHRVLHRDLKPQNLLIDRRSNSLKLADFGLARAFGIPVRTFTHEVVTLWYRAPEILLGSRHYSTPVDVWSVGCIFAEMVNQRPLFPGDSEIDELFKIFRVLGTPNEDTWPGVTSLPDYKGAFPKWPPKDLAAVVSSLDSTGVDLLSKMLSLDPSRRITARTALEHEYFKDI

SEQ ID NO: 1510 - protein, 444 aa, Methanosarcina acetivorans
MSLANLRTHYTAEVKPESVDNGQKITLAGWIHEVRDLGGICFVVLRDREGKAQVTLVKKKIDKELFDAARRLIRESVISVTGSVKFEEKAPNGYELLPEEIKVLNVAGSPLPMDTTGKVEAELDTRLDSRFIDLRRAETTAVFKIRHEALQAIREYFVKNKFIETATPKVVATATEGGTALFPITYFDREAFLNQSPQLFKQILMGGGFDRVFEIGPIFRAEEHDTRRHLNEATSIDVEVSFADHFDVMEILENLVAHIYTRVIENCKASLEILGVELKVPKTPFLKLTYDEVIEIVNSRCEEKMHWGDDLGTLGEHTVGNYVYETTGESHYFIIDWPTEIKPFYAMPYEDRPEFSKSFDMMHRTMELSSGAQRIHISELLKSRIESQGLNPDGFEFYLKAFEYGMPPHAGWGMGCERFVMTMLGTENIRDTVLFPRDRRRLSP

SEQ ID NO: 1511 - protein, 1877 aa, Oryza sativa
MAASTSTEVVVPAGAGAGAGAGRWRRDALAHTLGSRRLPEGVADAGERVPDAVAPGVMPFIRAADKVEQDSPRVAFLCRRYAYNKVQRMDPSSVQRGVRQFKTYMSVKLDQVCLKLDDTQVMGNDAKEIQRFYKSYCAELSRISEKRNFEEVARRYQVASALYEVLRDVTNNKVDSEVMKIAKVIEEKSVHFKNYKYNIIPLNFPGSSEAIVELHEIKGAIDALNSIDGLPMPHMSTMHTDGNKSIRDLLDWLSLAFGFQKSNVENQRENLVLLLANIGTRTAGQDHPLVDTVNKLWKKILQNYQSWCSYLHVSSSIMNVETVTQNKQQLMLLHIGLYLLIWGEASNVRFMPECLCYIFHHMARQLHKMIEENNFQSPPGFEEEGSFLKTAIEPIYKVLQKSVSFRFLPRRSEKCFARLNWPWDLTADFFYQGRTTSTKPKTNFVEVRTFLHIFRSFNRMWMFFILAFQAMLIVSWSSSGSLSALADATVFRSVLSVFITAALLNFIKVTLDIVLTFQAWGNMDWIQIVRYLLKFFVAIAWIIILPLAYSSSIRYPSGAGKLLNSWVGNWHNPSVYNVAIIIYIVPDILAAFLFLLPQLQNIMERSNWRVIGLIMWWIQPRLYVARGMHEDILSIIKYVFFWVVLLTCKLAFSFYVEISPIIGPTKFLLNQGVGNYEWHEIFPFLPHNLGVVITIWAPIVMVYFMDIQIWYAIFSTAFGGVSGALSHVGEVSDSFMYDNIFAVLKMFSCKISSFSFNVDTYPWHVKSQIQQACGEGRFFCVWNSFINSLREEDFISDRERDILMAPSFSSSFSVTPWPPFLVARIYQVPTALHMAMTSKEGDYHELIEKIRLDQARFNAVIECYESLVLILKNLLLDNNDQKIVDAIDKTVLDSVENNTLLEDFHMAEIGKVSNTLAKLLHLLSNESTDGTAERKIINALQDFMEITTRDFMKDGQGILKDENERKQRFTHLDMDMIKESFWKEKFVRLHLLLTMKDSAMDVPTNLDARRRITFFANSLFMKMPKAPQVHDMISFSVLTPYYNEEVLYSSHELNKKNEDGISILFYLQKIYPDEWKNFLERIGVDPENEEAVKGYMDDVRIWASYRGQTLARTVRGMMYYRRALELQCYEDMTNAQADLDGEESARSKAIADIKFTYVVSCQLYGMHKASKDSREKGLYENILNLMLTYPALRIAYIDEKEVPLPNGKMEKQYYSVLVKGNDEVEIYRIRLPGKPTDIGEGKPNNQNHAIIFTRGEALQAIDMNQDNYLEEAFKMRNLLEEFLIKHGKSEPTILGVREHIFTGRYSVSSLAWFMSNQETSFVTIGQRVLANTLKYVSFQVRFHYGHPDVFDRIFHLTRGGISKASKVINLSEDIFAGFNSTLRQGNVTHHEYIQLGKGRDVGMNQISNFEAKVANGNGEQTLCRDIYRLGHRFDFYRMLSLYFTTVGFYFNSMVAVLTVYVFLYGRLYLVLSGLEKSILQDPQIKNIKPFENALATQSIFQLGMLLVLPMMIEVGLEKGFGRALGEFVIMQLQLASVFFTFHLGTKTHYYGRTILHGGAKYRGTGRGFVVRHAKFAENYRMYSRSHFVKALELLILLVVYLAYGISYRSSSLYLYVTISIWFLVFCWLFAPFVFNPSCFEWHKTVDDWTDWWHWMSNRGGIGLAPEQSWEAWWISEHDHLRNGTIRSLLLEFVLSLRFLIYQYGIVYHLHIVHGNRSFMVYALSWLVIAIVLVSLKVVSMGREKFITNFQLVFRILKGIVFIVLISLVVILFVVFNLTVSDVGASILAFIPTGWFILQVSDARDVLRKIGPWDSIQEMARMYEYTMGILIFFPIAVLSWFPFVSEFQTRLLFNQAFSRGLQISRILTGQNGSGSKRD

SEQ ID NO: 1512 - protein, 772 aa, Arabidopsis thaliana
MAEMADKAKVEEMDWEGIDGVRMTWNLWPRTKVEASKCVIPLAASISPIRRHPLILDLPYAPLDCKTCKALLNAFARVDFAAMNWVCPFCYHRNHFPSHYHSISEINLPGELYPQYTTVEYTLPPDPSRVPPPPVFVFVLDTCMIEEELGYAKSALKQAIGLLPENALVGFVSFGTQAHVHELGFSEMSKVFVFKGNKEVTKDQILDQLGLGSSSRRAPTSGFSKGAQNGFQSSGVDRFLLPASECEYTLDLLLDELQSDQWPVQPGHRPQRCTGVALSVAAGLLGACLPGTGARIVALVGGPCTEGPGTIISKDLSDPVRSHKDLDKDAAPYYKKAVKFYDSIAKQLVAQGHVLDLFASALDQVGVAEMKVAVESTGGLVVLSESFGHSVFKDSFKRMFEDGEHSLGLCFNGTLEINCSKDIKIQGVIGPCSSLEKKGPNVADTVIGEGNTSAWKLCGLDKSTCLTVFFDLSSTGSTAPGALNQQLYLQFITRYQNSEGKSLARVTTLTRQWVDTAVSTENLVQGFDQETAAVVMARLTSLKMETEEGFDATRWLGRTLIRLCSKFGEYRKDDPTSFTLKPYLTLFPQFMFNLRRSQFVQVFNNSPDETAYFRMLLNRENISNAIVMIQPSLTSYSFNSGPQAALLDVASIAADKILLLDAYFSVVVFHGMTISQWRNMGYHHQPEHEAFAQLLQAPQEDSQMLVRERFPVPRLVVCDQHGSQARFLLAKLNPSATYNNANEMSAGSDIIFTDDVSLQVFIEHLQKLAVQS

SEQ ID NO: 1513 - protein, 645 aa, Lolium perenne
MESSAVVVQGTTAPLLPYAYAPLPSSADDARENQSSGGGVRWRACAASALVVLLVVVGFFAGGRVDLGQDGEVSATSSVPGSSRGKDSGVSEKESPADGGFPWSNAMLQWQHTGFHFQPLKHYMNDPNGPVYYGGWYHLFYQHNPYGDSWGNVSWGHAVSKDLVNWRHLPVALVPDQWYDINGVLTGSITVLPDGRVILLYTGNTDTFSQVQCLAVPADPSDPLLRSWIKHPANPILFPPPGIGLKDFRDPLTAWFEHSDNTWRTIIGSKDDDGHAGIVLSYKTTDFVNYELMPGNMHRGPDGTGMYECLDIYPVGGNSSEMLGGDSSPEVLFVLKESANDEWHDYYALGWFDAAANTWTPQDPEADLGIGLRYDWGKYYASKSFYDPIKNRRVVWAFVGETDSEQADKAKGWASLMSIPRTVELDKKTRTNLIQWPVEEIETLRRNVTDLGGITVEAGSVIHLPLQQGGQLDIEASFRLNSSDIDALNEADVGFNCSSSDGAAVRGALGPFGLLVFADGRHEQTAAYFYVSKGLDGSLLTHYCHDESRSTRAKDVVSRVVGGTVPVLDGETFSVRVLVDHSIVQSFVMGGRTTVTSRAYPTEAIYAAAGVYLFNNATSATITAEGLVVYEMASAESRAFLADDM

SEQ ID NO: 1514 - protein, 823 aa, Oryza sativa
MADNPPLIMLLAFLFSALLLLSPAHGGSRLQRGESLSVERASDILVSSNGVFAFGFYNLSSTVFTVSIWFAASAGRTVAWTANRDRPVHGAGSKLTLRRDGRLVLADYDGTPVWQTNSSSGAAAAAELTDSGNLVVTSHGGDVLWQSFDYPTDTLLPGQPVTATARLSTTDVLHPTSHYALRFDDRYLLSLAYDGPDISNIYWPDPDASSWANGRISYNASRRGVLDDAGRFLASDNTTFVASDTGAAAGGVTWRRLTLDHDGNLRLYSLRDADGGWSVSWMAFSQPCGIHGLCGWNGLCVYTPRPACSCPPGYVPADAGDRGKGCRPTFNLTCGGGGGRPEMGFARLPQTDFWGSDLNLFSSISVDGCKAACLELCNCVAFEYKDDVSDCYLKSALFNGKTYPGYPGTVYLKLPANLVAESDTYTAAPAAAAAVNLACDAARTEEVLLSFSAASPDTSSWRYYYGFLSAFFAVELCFIAFGWWFTARSRPATSEQWAAEEGYRVVTDHFRRFTYGELRKATKNFKDVIGHGRYGSVYRGVLAGAGDDRAVAVKKLKAATPQRGDDEFETEVSVIGRINHMNLVRIRGVCSERHRRRRLLVYEYVDNGSLATWLFGAKETLNWNQRYNIAVGVAKGLAYLHHECLDWIIHCDVKPENILLDEDFEPKISDFGLAKMQQRRDLDDPASFSIRGTRGYMAPEWVSSLPITEKVDVYSYGVVLLELVRGARMADLATDSVGDAEIAMRQLVWKIREGLKIGDRTWVISLVDRRLNGSFVYSQVALMLEVATSCLEKERNQRPSMNDVVKKFYTSDKKVEFIGEMSS

SEQ ID NO: 1515 - protein, 602 aa, Oryza sativa
MLCFYVYNSLLQDEYRVRFHYGHPDIFDRLFHITRGGISKASKTINLSEDIFSGFNSTMREGNVTHHEYMQVGKGRDVGMNQISSFEAKVANGNGEQTLSRDIYRLGRRFDFYRMLSFYFTTVGFYFSSMVTVLTVYVFLYGRLYLVMSGLERSILLDPRIEQNIKPLENALASQSFFQLGLLLVLPMVMEVGLEKGFRTALGEFVIMQLQLASVFFTFQLGTKTHYYGRTILHGGAKYRPTGRGFVVYHAKFADNYRMYSRSHFVKGLELLILLVVYLVYGSSYRSSSMYLFVTFSIWFLVASWLFAPFIFNPSCFEWQKTVDDWTDWRKWMGNRGGIGMSVDQSWEAWWISEQEHLRKTSIRSLLLEIILSLRFLIYQYGIVYHLNIARRSKSILVYGLSWLVMLSVLVVLKMVSIGRQKFGTDLQLMFRILKGLLFLGFVSVMAVLFVVCNLTISDVFASILGFMPTDWAGMFAVGEEGNAVGFHHGAREVVREPDGTRPLPPHRPLVMVPLRVRVPDTTALQPGLQPWPPDLKDPRRAKGHWRGMNEWMNGPSWPRLLRNVIVRVFEGQATSPARLCATIEVEDERETWKMVGLLATL

SEQ ID NO: 1516 - protein, 488 aa, Oryza sativa
MGENVVGTYYYPPSAAAMDGVELGHAAAGSKLFDDDGRPRRNGTMWTASAHIITAVIGSGVLSLGWAIAQLGWVAGPAVMVLFSLVTYYTSSLLSDCYRSGDPVTGKRNYTYMDAVNANLSGFKVKICGFLQYANIVGVAIGYTIAASISMLAIGRANCFHRKGHGDPCNVSSVPYMIVFGVAEVFFSQIPDFDQISWLSMLAAVMSFTYSVIGLSLGIVQVVANGGLKGSLTGISIGVVTPMDKVWRSLQAFGDIAFAYSYSLILIEIQDTIRAPPPSESAVMKRATVVSVAVTTVFYMLCGSMGYAAFGDDAPGNLLTGFGFYEPFWLLDIANAAIVVHLVGAYQVFCQPLFAFVEKWAAQRWPESPYITGEVELRLSPSSRRCRVNLFRSTWRTAFVVATTVVSMLLPFFNDVVGFLGALGFWPLTVYFPVEMYVVQKKVPRWSTRWVCLQMLSVGCLVISIAAAAGSIAGVMSDLKVYRPFKGY

SEQ ID NO: 1517 - protein, 795 aa, Oryza sativa
MGKFLCPLFISFISVLLCCAASASPWQTTGTGTSLQVDHGETFLVSPDTTFSCGFYPSGDDTNAFYFSIWFTHATDRTVVWTADSGLPVNGHGSKISLSHEGNLAFTDVNGTTVWESKTGWGKHTTVALLNSGNMVMKASDSEDKIVWQSFDWPTDTLLPSQRLTREKRLVSQSGNHFLYFDNDNVLRLQYNGPEITSIYWPSPDYTAVQNGRTRFNSSKIAVLDDEGRFLSSDGFKMVALDSGLGIQRRITIDYDGNLRMYSLNASDGNWTITGEGVLQMCYVHGLCGRNGICEYSPGLRCTCPPGYEMTDPENWSRGCRPTFSVSCGQQREDFTFVKIPHGDYYGFDLTSNKSISLEECMRICMDSCVCLSFTYKGGDGLCYTKGLLYNGQVYPYFPGDNYIKLPKNVASTSLISKHHGLTCKPNASKVMLVSIDAYRKNSDNIMWAYLYVFATIIGAVELVFIMTGWYFLFKMHNIPKSMEKGYKMITSQFRRFTYRELVEATGKFKEELGKGGSGTVYRGILGDKKVVAVKKLTDVRQGEEEFWAEVTLIGRINHINLVRMWGFCSEGRQRLLVYEYVENESLDRYLFDDSGTRNLLSWSQRFKIALGTTRGLAYLHHECLEWVVHCDVKPENILLNRDFEAKIADFGLSKLSKRDSSTFNFTHMRGTMGYMAPEWALNLPINAKVDVYSYGVVLLEIVTGTRVSSGITIEEENIDLMQFVQVVKQMLTSGEVLDTIVDSRLKGHFNCDQAKAMVKAAISCLEERSKRPTMDQIVKDLMVYDDEDYHPAYF

SEQ ID NO: 1518 - protein, 781 aa, Oryza sativa
MARLLCLVILPLISVLPFSYASPLLMLSTGSSLFVEEHKQTFLTSPNADFSCGFYEVGGNAFSFSIWFTNSKNRTVVWSANPKSPVNGHGSKVTLNHEGNLVLADVNGTANWDSKTSSGKGTTAVLLDTGNLVIRDSTGTKLWQSFWAPTDTLLPLQPLTKGTRLVSGYFNLYFDNDNVLRLMYDGPEISSIYWPSPDYSVFDIGRTSYNGSRNAILDTEGHFLSSDKLDIKAADWGAGINRRLTLDYDGNLRMYSLNASDGSWKVSWQAIAKLCDVHGLCGENGICEFLPSFKCSCPPGYEMRDPTNWSRGCRPLFSKNCSKIEEYEFFKLAQTDFYGFDLIINQSISLKECKKTCLDICSCSAVTYKTGSGTCYIKYVLFNGYSSTNFPGDNYIKLPKNMVSKQSDLSCNPTKEIVLGSSSMYGMNDANKNYATYYVFAAVLGALVLIFTGTSWWFLYSKHNIPMSMEAGYRMVTSQFRMFTYRELREATGKFKEEIGRGASGIVYRGVLEDKRVIAVKRLMNISHGEEEFWAEMSIIGRINHMNLVRMWGFCSEGQQKLLVYEYVDNESLDKYLFGDVSAERLLAWSQRFKIALGTARGLAYLHHECLEWVVHCDVKPENILLTRDFEVKIADFGLAKLSKRDSTSLNFTHMRGTMGYMAPEWALNSPINAKVDVYSYGVVLLEIVTGSRISSGIKVDGREVELRDFVQVMKHILATGDVKDVIDTRLNGHFNSEQAKVMVEVAISCLEERNSRPTMDEIAKAFLACDDEDNHPAYSW

SEQ ID NO: 1519 - protein, 659 aa, Oryza sativa
MLHLASISAQPNPWCKKQCGDVKIPYPFGIGTGCAIGEGFEIICNRNADGIDQPFTGNIEVLDISVVYGRSRVLGSITTNCYNSSTGSANVNSWWMDLSTSPYRFSDAYNTFVVIGCNTLAYIYNGLNRTSYTTACASVCGGPEDLTNGSCLGVGCCQNANAIPKGLTRQDIYLYTIYNTSESDSWKFNPCSYAALVETESFSFSTEYITTMRFNDTYEGQQPLVLDWAIGDVSCEVAKNMTSYACHSGNSICIGSVALVITIFFMRLMFERRKLTDVKKKYFQQHGGLILFDKMKSDQGLAFKVFTQAELEHATNKFEKSQILGHGGHGTVYKGITKDNITVAVKKCALIDDRHKKEFGKEMLILSQINHKNIVKLLGCCLEVDIPMLVYEFIPNGTLFDLIHGKNRTFHIPFSSLLRIVNEAAEGLAFLHSYANPPILHGDVKTSNILLDENYMAKVSDFGASILALSDEDQFVTMVQGTCGYLDPEYLQTCRLTDKSDVYSFGVVLLEVMTGQMPLKFEGPEIQKSLSSSFLLAMKENNLEAMLDSQIKDHESMELLSGLADIAKKCLDMCSDNRPSMKEVSEELSRLRKFSKHPWIQRDTEIESFLSGPSTSNLETEHSYLSGPSTSNFEIEHNTEYRRKDEEMPINPSTSYFIR

SEQ ID NO: 1520 - protein, 623 aa, Lolium perenne
MESRAIPSAAYAPLLPSAADDVALAKQDRPSVGWRGFLTVLAASGVVVLLVGATLLAGSRMGQAGDGEGNTDEDGAGGFPWSNEMLQWQRAGFHYQPEGHFMSDPNGPVYYRGYYHLFFQYNRRGVAWDDYIEWGHVVSQDLVHWRPLPLAMRPDHWYDKKGVLSGTITVLHNGTLVLLYTGVTEDPMAESQCIAVPTDPNDPLLRHWTKHPANPVLAHPQGVQGMDFRDPTSAWWDKSDSTWRILIGSKDDDNGSHAGIAFIFKTKDFLSFERVPGIVHRVEGTGMWECIDFYPVGGGHNSSSEELYVIKASMDDERHDYYSLGRYDAAANTWTPLDAELDLGIGLRYDWGKLYASTSFYDPLKQRRIMLGYVGEVDSARADVAKGWASLQSIPRTVALDEKTRTNLLLWPVEEVEALRYNSTDLSGITVENGSIFHLPLHQATQLDIEASFRLDASDVAAINEADVGYNCSSSGGAAARGALGPFGLLVHAAGDLRGEQTAVYFYVSRALDGSLRTSFCNDETRSSRARDVTKRVVGSTVPVLDGEALSMRVLVDHSIVQSFAMGGRVTATSRVYPTEAIYARAGVYLFNNATGASVTAERLIVHEMASAVYDETVMVKDS

SEQ ID NO: 1521 - protein, 490 aa, Arabidopsis thaliana
MDGGGETTATATMEGRGLKKGPWTTTEDAILTEYVRKHGEGNWNAVQKNSGLLRCGKSCRLRWANHLRPNLKKGSFTPDEEKIIIDLHAKLGNKWARMASQLPGRTDNEIKNYWNTRMKRRQRAGLPLYPHEIQHQGIDIDDEFEFDLTSFQFQNQDLDHNHQNMIQYTNSSNTSSSSSSFSSSSSQPSKRLRPDPLVSTNPGLNPIPDSSMDFQMFSLYNNSLENDNNQFGFSVPLSSSSSSNEVCNPNHILEYISENSDTRNTNKKDIDAMSYSSLLMGDLEIRSSSFPLGLDNSVLELPSNQRPTHSFSSSPIIDNGVHLEPPSGNSGLLDALLEESQALSRGGLFKDVRVSSSDLCEVQDKRVKMDFENLLIDHLNSSNHSSLGANPNIHNKYNEPTMVKVTVDDDDELLTSLLNNFPSTTTPLPDWYRVTEMQNEASYLAPPSGILMGNHQGNGRVEPPTVPPSSSVDPMASLGSCYWSNMPSIC

SEQ ID NO: 1522 - protein, 841 aa, Arabidopsis thaliana
MELDDLDLSGSWPLDQITFASNFKSPVIFSSSEQPFSPLWSFSETSGDVGGELYSAAVAPTRFTDYSVLLASSESETTTKENNQVPSPSWGIMPLENPDSYCAIKAKMTQALRYFKESTGQQHVLAQVWAPVKNRGRYVLTTSGQPFVLGPNSNGLNQYRMVSLTYMFSLDGERDGELGLPGRVFRKKLPEWTPNVQYYSSKEFSRLGHALHYNVQGTLALPVFEPSRQLCVGVVELIMTSPKINYAPEVEKVCKALEAVNLKTSEILNHETTQICNEGRQNALAEILEILTVVCETYKLPLAQTWVPCRYRSVLAFGGGFKKSCSSFDGSCMGKVCMSTSDLAVYVVDAHVWGFRDACAEHHLQKGQGVAGRAFQSGNLCFCRDVTRFCKTDYPLVHYARMFKLTSCFAVCLKSTYTGDDEYVLEFFLPPAITDKSEQDCLLGSLLQTMKQHYSSLKVVSETELCENNMSLEVVEASEDGMVYSKLEPIRIHHPAQISKDYLELNAPEQKVSLNSDFMENNEVDDGVERFQTLDPIPEAKTVKKSERKRGKTEKTISLEVLQQYFAGSLKDAAKSLGVCPTTMKRICRQHGISRWPSRKINKVNRSLTRLKHVIDSVQGADGSLNLTSLSPRPWPHQIPPIDIQLAKNCPPTSTSPLSNLQDVKIENRDAEDSAGSSTSRASCKVNPICETRFRLPTHNQEPSRQVALDDSDSSSKNMTNFWAHLTCQDTASPTILQHKLVSIKATYREDIIRFKISPESVSITELKQQVAKRLKLETAAFELKYLDDDREWVSVSCDADLSECLDTSAAKANTLRLSVHDVTFNFGSSCESSEETMMCL

SEQ ID NO: 1523 - protein, 453 aa, Arabidopsis thaliana
MELSDPNNGKTNKPKQPPKRFIKNQIPDSILGDASLNAAISILPSIYHFEVHKCVWRIKTSNAKRIALQLPEGLLMYALTLSDIFTSFAGASHCFVLGDVTYGACCVDDFSACALGADLLIHYGHSCLVPIDSTKIPCLYVFVEIQIDVKCLLNTIHLNLASDVKNIILAGTIQFTSAIRAVKPELEKQGFNVLIPQSKPLSAGEVLGCTAPKVKTVEDCKDQVLVFVADGRFHLEAFMIANPKIKAFRYDPYLGKLFLEEYDHKGMRETRMRAIARAREAKTWGIVLGTLGRQGNPKILERLEKKMMEKGIDSTVVLMSELSPTRVALFEDSVDAWVQIACPRLSIDWGEAFLKPLLTTFEAEIALGFIRGWWENDSSSRVNSSSGCCKEDKETSCACKNENVKDDKKDNDGALDGDYPMDYYAQEGGEWNSSYLKKSSRPIRRNPLPSSVV

SEQ ID NO: 1524 - protein, 475 aa, Arabidopsis thaliana
MGGGFRVLHLVRPFLAFLPEVQSADRKIPFREKVIYTVISLFIFLVCSQLPLYGIHSTTGADPFYWMRVILASNRGTVMELGITPIVTSGLVMQLLAGSKIIEVDNNVREDRALLNGAQKLLGILIAIGEAVAYVLSGMYGPVGQLGVGNAILIILQLFFAGIIVICLDELLQKGYGLGSGISLFIATNICESIIWKAFSPTTINTGRGAEFEGAVIALFHMLITKSNKVAALRQAFYRQNLPNVTNLLATVLIFLIVIYFQGFRVVLPVRSKSARGQQGSYPIKLFYTSNMPIILQSALVSNLYFISQLLYRKFSGNFFVNLLGQWKESEYSGQSIPVSGLAYLITAPASFADMAAHPFHALFYIVFMLTACALFSKTWIEVSGSSARDVAKQLKEQQMVMPGHRESNLQKELNRYIPTAAAFGGVCIGALTVLADFMGAIGSGTGILLAVTIIYQYFETFEKEKASELGFFGF

SEQ ID NO: 1525 - protein, 259 aa, Echinochloa crus-galli
AGPIFNDYSSVGYSFLLKKDKAIIVQPERVIVGNGPAFGCVMMKEFLSELAKRLKKNTTAYENYKRIFVPEGSPLESEPNEPLRVNVLFKHIQKMLTGDSAVIAETGDSWFNCQKLKLPEGCGYEFQMQYGSIGWSVGALLGYAQGANDKRVIACIGDGSFQVTAQDVSTMLRCAQNSIIFLINNGGYTIEVEIHDGPYNVIKNWNYTGLVDAIHNGEGKCWTSKVKCEEELTAAIETALGEKKDCLCFIEVIVHKDDT

SEQ ID NO: 1526 - protein, 1642 aa, Oryza sativa
MAFEMYGMLVGNVSALTGEYVKPAYGGEKEAFLKKVVTPIYLTIAKEAERSKREKGNHSEWRNYDDLNEYFWSAECFRLGWPMRADADFFCQHLNSPDQRNETTRTEKQKGKVNFVELRSFWHIFRSFDRMWSFFILALQVMVILAWNGGSLGNIFDPVVFKKILSIFITSAILNLGQATLDIIFNWKARRTMEFAVKLRYVLKFTLAALWVVLLPVTYAYTWENPTGIIRAIKGWFGNGQNHPSLFVLAVVIYLSPSLLAAILFLLPFLRRILESSDYKFVRFVMWWSQLTTDQDNVENIVVSYYLRRRPDMTKQNPRLFVGRGMHESAFSLFMYTMFWIALLLIKFAFSYYVEIKPLVEPTKDIMKLPIHTFQWHEFFPKANGNIGVVIALWAPIILVYFMDTQIWYTIFSTLLGGIYGAFQRLGEIRTLGMLRSRFGSIPLAFNACLIPAEESDAKRKKGLKSYLHSRFERKHTDKEKIAARFAQMWNEIITSFREEDLINNKEKELLLVPYVADQALEIMQWPPFLLASKIPIAVDMAKDSNGKDRDLKKRLENDYYFKCAIEECYASFKNIIKDLVQGEPEKRVINTIFAEVEKYIADDKVITDLNMHALPDLYNKFVELVKYLEKNDKNDRDAVIKIFQDMLEVVTRDIMEDQLSSILESSHGGSYQRPEGTTTWDQEYQLFQPAGAIKFPVQFTDAWIEKIKRLELLLTVKESAMDVPSNLEARRRLTFFTNSLFMDMPDAPKVRNMLSFSALTPYYNEPVLFSIKELQEENEDGVSTLFYLQKIYPDEWKNFQQRVEWDEELKENEDKNEELRLWASYRGQTLARTVRGMMYYRKALVLEAFLDMAKHEDLMEGYKAVESTDEQWKLQRSLFAQCEAVADMKFTYVVSCQQYGNDKRAALPNAQDILQLMRTYPSLRVAYIDQVEDRVEEKKMEPAYYSTLVKVALTKDSESTDPVQNLDQKWIKCESSFCDPVKLQHLHFFVFKVIYRIKLPGPAMLGEGKPENQNHAIIFTRGEGLQTIDMNQDNYMEEALKMRNLLQEFLTEHGVRRPSILGVREHIFTGSVSSLAWFMSNQEHSFVTIGQRLLANPLKVRFHYGHPDVFDRIFHLTRGGVSKASRSINLSEDIFAGYNSTLRGGNITHHEYVQVGKGRDVGLNQISKFEAKVANGNGEQTLSRDIYRLGHRFDFFRMLSCYFTTVGFYFSTLLTVVTVYVFLYGRLYLALSGLEEGLLTQRRYIHNHPLQVALASQSLVQLGFLMALPMMMEIGLEKGFGQALSEFIMMNLQLAAVFFTFSLGTKTHYYGRMLLHGGAQYRATGRGFVVFHAKFAENYRLYSRSHFVKGIELLILLIIYQLFGQSYRSTIAYIFVTFSMWFLVLTWLFAPFLFNPSGFEWTKIVDDWSDWNKWISNRGGIGVSPDKSWESWWEIELEHLKYSGTIGLFVEIILSLRFFIYQYGLVYHLNITGDKSILVYLISWLVILVVLLVMKTVSVGRRRFSADFQLFFRLIKFMIFVSFIAILIVLIAILHMTLRDIFVCFLAFLPSGWGILLIAQACKPLARRAGLWGSVRALARAYEIIMGVLLFTPITILAWFPFVSEFQTRMLFNQAFSRGLQISRILGGQKKERERSSRNKD

SEQ ID NO: 1527 - protein, 478 aa, Bartonella henselae
MKRARKVKIIATLGPSSFSISMIEKLFMAGADVFRLNMSHTDRETMVDLVQRIRKVEKTVRRPIGILVDLQGPKLRVGCFDKGQEDLRIGQSFTLDDRDILGDAQRVFFPHGEVLAAIKPGDRLLIDDGKLELLAQVCDGHSVQCLVVAGNRISDRKGVSLPDTVLPFGPMTLKDKADLQAVLEQPVDWVALSFIQRPEDIIAVRALTKSKVSLMAKIEKPQALEHIEEIIDVADGIMIARGDLGVEMPLERVPAIQMELIKACRLAGKPVVVATQMLESMITSSVPTRAEVSDVATAVYTGTDAVMLSAESASGRYPEEAVLMMDRIAQQIEQDQTYAAQVGAQHPAPESTGTDAISLAARQIAETLQLTAIVAYTASGTTGVRTSRERPNRPIIALSPIVKTARRLALVWGLHCVVTEDARDLEDMVDRAAAIAFQEGFCQGGDRFLVTAGVPLGTPGATNLLRIASVSQDGTKGV

SEQ ID NO: 1528 - protein, 623 aa, Allium sativum
MESRDIESSPALNAPLLQTTPPVKSSKLKVVLLAISTSVILVLATFFAVKYSVFESGTGLVKEDAPAAGDGYPWTNDMFEWQRPGYHFQPPYHFMGDPNAAMYYKGWYHFFYQYNPYGSAWDTTISWAHAVSKDMIHWLHLPIAMVPDHWYDSKGVWSGYATTLPDGRIIVLYTGGTDELVQVQNLAEPADPSDPLLIEWKKSNHNPILMPPPGVGPHDFRDPFPVWYNESDSNWHMLIGSKDDNHYGTVLIYLTKDFKTYTLLPEILHKTKDNVGMLECVDLYPVATTGNQIGNGLEMQVGFGKGIKHVLKASMDDERHDYYAIGTFDLESFTWVPDDDTIDVGVGLRYDYGKFYASKTFYDQEKRRRILWGYVGEVDSKTDDARKGWANVLNIARTILFDVKTRSNLLVWPVEELDALRTSSKEFNGVVVEPGFTYHLDVGTASQLDIEAEFEINQEAVDAVVEADVTYNCSTSDGSAHRGLLGPFGLLVLANEKMTEKTATYFYVSRTVDGGLQTHFCQDELRSSKANDITKRVVGHTVPVLHGETFSLRILVDHSIVESFAQKGRAVATSRVYPTEAIFDSTRIFLFNNATSATLTAKSVKIWHMNSTHNHPFPGFPFP

SEQ ID NO: 1529 - protein, 425 aa, Thermoanaerobacter tengcongensis
MAKYDDHKQLKCSFCGKTQDQVRRLVAGPGVYICDECIELCQEIINEEFEEDMDMAMRDLPKPKEIKAFLDQYVIGQDRAKKALAVAVYNHYKRINSKVKSDDVELQKSNILLLGPTGSGKTLLAQTLAKLLNVPFAIADATTLTEAGYVGEDVENILLRLIQAADYDIERAEKGIIYIDEIDKIARKSENPSITRDVSGEGVQQALLKILEGTIANVPPQGGRKHPHQEFIQIDTTNILFICGGAFEGIDKIIESRIGKKSLGFGAEVQSKKEKDVGEILKHIMPEDLLKFGMIPEFIGRVPIVVTLDPLTKDDLVRILTEPKNALVKQYEKLFEMDGVKLEFEKKALDLIAEMALERGTGARGLRAILEDIMLDVMYEIPSDETIEKCIITEETVRKIAPPTLVYADAQKIGRKKAKKTESVS

SEQ ID NO: 1530 - protein, 409 aa, Thermoanaerobacter tengcongensis
MNRVVVTGLGVISPLGNTVEKFWNSLINGENGIGLVTKFDTSEFPTKVAAEVKDFDPTLYIDKKEARRMDRFIQFAVASTKLALEDAGIELDKVDLNRFGVIYGTGIGGIETFENQMKVMYEKGPSKVSPFFIPMMIANMAAGQIAITFGLKGINETIVNACASSTNAIGEAFKAIQRGDADLIVTGGTEAAITPMSFAGFCAMKAMSTNPDPSTASRPFDLNRDGFVMGEGSATLILESLEHAQKRGAKIYAEIIGYGATDDAYHITAPAPEGEGAARAMEAALKDGKVSYDMVDYINAHGTSTEYNDKFETMAIKKVFKDHAYKLCVSSNKSMLGHLLGAAGAVEAVATVLTITHGIVPPTINYQTPDPECDLNYVPNKAIEREVNYAISNSFGFGGHNATLLFKKF

SEQ ID NO: 1531 - protein, 125 aa, Thermoanaerobacter tengcongensis
MSKEEILQAIKNMTVLELAELVKALEEEFGVSAAAPVAVAAAPAAGAPAAAPAEEKTEFDVILQEVGSDKIKVIKVVREITGLGLKEAKDLVDSVPKPIKEGVSKEEANQIKAKFEEVGAKVEIK

SEQ ID NO: 1532 - protein, 491 aa, Deschampsia antarctica
GPKSRSVEAISACLKAGMSVARFDFSWGDAAYHQETLENLKLAIKATKKLCAVMLGTVGPELQVVNKSEVTISLEENESVVLTPHQGQEASSKLLPINFSGLAKALKPGDTIFVGQYLFTGSETTSVWLEVSEVQGDDVVCVIKNSATLAGSLFTLHCSQIHIDLPTLSDEDKDVIKKWGAPNKIDFLSLSYTRHAEDVRQAREYLSKLGDLSQTLIFAKIENVEGLNHFDEILEEADGIFLSRGNLGIDLPPEKVFLFQKSALHKCNMAGKPAVVTRVVDSMTDNLRPTRAEATDVANAVLDGSDAILLGAETLRGLYPVETISTVGRICAEAEKVFNQDLYFKRTVKYVGEPMTHLESIASSAVRAAIKVKASVIICFTSSGRAARLIAKYRPTMPVLSVVIPRLKTNQLKWSFTGAFEARQSLIVRGLFPMLADPRHPAESTSTTNESVLKVALDHGKTSGVIKSHDRVVVCQKVGDSSVVKIIELDD

SEQ ID NO: 1533 - protein, 631 aa, Rhodopseudomonas sp.
MGKVIGIDLGTTNSCVAVMDGKSAKVIENAEGMRTTPSIVAITDDGERLVGQPAKRQAVTNPERTFFAVKRLIGRRYDDPMVEKDKGLVPYKIVKASNGDAWVEADGKTYSPSQVSAFILQKMKETAEAHLGQKVDQAVITVPAYFNDAQRQATKDAGKIAGLEVLRIINEPTAAALAYGLDKAKTGTIAVYDLGGGTFDVSILEIGDGVFEVKSTNGDTFLGGEDFDMRLVNYLADEFQKEQGIDLRKDKLALQRLKEAAEKAKIELSSTTQTEINLPFITADQSGPKHLTMKLTRAKFEALVDDLVQKTIEPCRKALKDAGLTAGEISEVVLVGGMTRMPKVQEVVKQLFGKEPHKGVNPDEVVAIGAAIQAGVLQGDVKDVLLLDVTPLSLGIETLGGVFTRIIDRNTTIPTKKSQVFSTAEDNQNAVTIRVFQGEREMAADNKMLGQFDLMGIPPAPRGMPQIEVTFDIDANGIVNVSAKDKATGKEQQIRIQASGGLSDSEIDKMVKDAEANAAEDKKRREAVDAKNHADALVHSTEKALAEHGSKIDEGERRSIEDALSDLREALKGDDAEAIKTKSNTLAQASMKLGEAMYKQAEAGGAAQQAGKDDVVDAEFTEVDDDKKKSA

SEQ ID NO: 1534 - protein, 381 aa, Pisum sativum
CVFDAKSVLSSSRRKHVNGSGVRCMAVKEATSETKKRSGYEIITLTSWLLQQEQKPIIDAELTIVLSSISMACKQIASLVQRANISNLTGTQGAVNIQGEDQKKLDVISNEVFSNCLRSSGRTGIIASEEEDVPVAVEESYSGNYIVVFDPLDGSSNLDAAVSTGSIFGIYSPNDECLPDFGDDSDDNTLGTEEQRCIVNVCQPGSNLLAAGYCMYSSSVIFVLTIGKGVFVFTLDPLYGEFVLTQENLQIPKSGKIYSFNEGNYKLWDENLKKYIDDLKEPGPSGKPYSARYIGSLVGDFHRTLLYGGIYGYPRDKKSKNGKLRLLYECAPMSFIVEQAGGKGSDGHQRVLDIQPTEIHQRVPLYIGSTEEVEKVEKYLA

SEQ ID NO: 1535 - protein, 471 aa, Yarrowia lipolytica
MAGVRFLDLVKPFTPFLPEVQAPERKVPFNQKIMWTAVTLMIFLVMSEIPLYGINSSDKSDALYWLRMMLASNRGSLMELGITPIVSSGMVFQLLGGTQLIEVNMDLKSDRELYQTAQKLFAIILSLGQATVYVLTGMYGPPKDLGVGVCLLLIFQLVLAALVVILLDELLQKGYGLGSGISLFIATNICEQIFWKAFAPTTVNKGRGYEFEGAIVAFVHLLFTRKDKKRAIIEAFTRQDLPNMSQLVTTVAIFAAVIYLQGFRVDIPVKSSKQRGPYGVFPIKLFYTSNLPIMLQSALTSNIFIISQMLFKKFPTNVLVRLLGVWDGREGMQQLFPVSGIAYYMQPPFNAKEALADPVKTVIYIAFVLGVCAVFSATWIEISGSSPRDVAKQFKEQGLVIAGRRETSAYKELKRIIPTAAAFGGATIGALSVASDLLGALSSGTGILMAVTTIYGYYEMAAKEGYVDAAI

SEQ ID NO: 1536 - protein, 556 aa, Arabidopsis thaliana
MSGSVSGCGSGGCSIVWFRRDLRVEDNPALAAAVRAGPVIALFVWAPEEEGHYHPGRVSRWWLKNSLAQLDSSLRSLGTCLITKRSTDSVASLLDVVKSTGASQIFFNHLYDPLSLVRDHRAKDVLTAQGIAVRSFNADLLYEPWEVTDELGRPFSMFAAFWERCLSMPYDPESPLLPPKKIISGDVSKCVADPLVFEDDSEKGSNALLARAWSPGWSNGDKALTTFINGPLLEYSKNRRKADSATTSFLSPHLHFGEVSVRKVFHLVRIKQVAWANEGNEAGEESVNLFLKSIGLREYSRYISFNHPYSHERPLLGHLKFFPWAVDENYFKAWRQGRTGYPLVDAGMRELWATGWLHDRIRVVVSSFFVKVLQLPWRWGMKYFWDTLLDADLESDALGWQYITGTLPDSREFDRIDNPQFEGYKFDPNGEYVRRWLPELSRLPTDWIHHPWNAPESVLQAAGIELGSNYPLPIVGLDEAKARLHEALSQMWQLEAASRAAIENGSEEGLGDSAEVEEAPIEFPRDITMEETEPTRLNPNRRYEDGSKHYFFFDQT

SEQ ID NO: 1537 - protein, 530 aa, Oryza sativa; identical to SEQ ID NO: 723

SEQ ID NO: 1538 - protein, 772 aa, Oryza sativa
MAKFLYLIILSFFLSLLVFCTSASPRLTLHTGSSFSVEDYKHTFLTSPNSTFSCGFYPIGTNAFTFSIWLTNTAGKTVVWSANRRSPVNGHGSKVLLHDDGYLVLIDVNGSTVWTSTMSAGEGSTAALLESGNLVVRDSSGTILWESFTSPTDTLLPAQQLTKDTRLVSGYHSLYFDNDNSLRLVYNGPEFSSIYWPNDDYTMFRDGIKVKNNSRLAVLDDKGGFFSSDALTVQASDFGLGIKRRLTLDYDGNLRIYSLDASDGSWTVTWQAIVEMHYVHGMCGKNGICEYLPELRCSCPPGFEMVDPQNWSKGCRPTFSYNCGKERYKFIEIPQTDFYDFDLGFNQSISFEECQNICLSTCSCIAFSYRLTGTGVCYPKGLLFNGYKSPAFPGTLYLKVPYSTNLQASSTQSALTCSPGSQEIATPSDHPRWLYFYIFPGVFGALELIFILTAWWFLSIRNDIQNSAEGGYMMIRNQFRGFTYQELKEATGKFREELGRGSSGIVYRGVLKDKRVIAVKKLIDVTRGEVEFQAEMSVIGKINHMNLVRIWGFCSEGKHKLLVYEYVENESLDRYLFNTMGTERLLVWKDRFNIALGAARALAYLHHDCLEWVFHCDVKPENILLTRDFEAKIADFGLSKLYKREGSSFNFSQMRGTMGYMAPEWATNLPINAKVDVYSYGVVLLEIVAGQRISSHTTREGKVTKLKQFIENVKEALATGDTKCIVDGRLHGQFNSEQAMVMLIVAVSCLEEERSKRPTMHEVVKSLLDCEE

SEQ ID NO: 1539 - protein, 729 aa, Oryza sativa
MVGIDLNTVEEEEDEEEGGATGTVTAPAEARAGGAVCLELWHACAGPVAPLPRKGSAVVYLPQGHLEHLGAAPGSGPGAAVPPHVFCRVVDVSLHADAATDEVYAQVSLVADNEEVERRMREGEDGAACDGEGEDAVKRPARIPHMFCKTLTASDTSTHGGFSVPRRAAEDCFPPLDYSLQRPFQELVAKDLHGTEWRFRHIYRGQPRRHLLTTGWSGFINKKKLVSGDAVLFLRGEDGELRLGVRRAAQLKNASPFPALHNQISNTSSLSEVAHAVAVKSIFHIYYNPRLSQSEFIIPYWKFMRSFSQPFSVGMRFKLRYESEDASERRRTGIIIGSREADPMWHGSKWKCLVVKWDDDVECRRPNGVSPWEIELSGSVSGSHLSTPHSKRLKSCFPQVNPDIVLPNGSVSSDFAESARFHKVLQGQELLGLKTRDGTVNTASQATEARNFQYTDERSCSINMSNNILGVPRLGVKTPSGNPGFSYHCSGFGESQRFQEVLQGQEVFRPYRGGTLSDACIRGSGFRQPDGNHAPGAAFKWLAPQGCDHHGITTSVLPQASSPSSVLMFPQTSSKMPGLEYIYGCLDRNENSRHFKIGPTQDMTRTDQTLRLWPHLISGKVLDECTRNEKLHSPVSGAEHESNNKCLNTNGCKIFGISLTEKAQAGDEVDCGNASYHSRLQSLKPQMPKSLGSSCATHFHRLCYRIQDDDRGNADDTRRMLVKFVVMHF

SEQ ID NO: 1540 - protein, 408 aa, Oryza sativa
MNGASSGGGGGAGAGGDGPLVYQRWKGNNGRFIFGPDARSLYVTMFLIIAPASIFCLFVAKELMNNFSYGLGLPVMISAVVFTAYDLSLLLLTSGRDPGIIPRNAHPPEPEGLDGNAEVGSNQTPPMRLPRVKDVVVNGITVKTKYCDTCMLYRPPRCSHCSICNNCVERFDHHCPWVGQCIGLRNYRFFYMFVFSTTLLCLYVFGFCWVYIVKIRNSEQITIWKAMAKTPASIALLVYTFIAVWFVGGLSVFHLYLMSTNQTTYENFRYRYDQRANPYNRGVMENIKDIFFSAIPASKNNFRARVPVPQEQGLRPRPTNGFMSPNMGRAVGDIEMGRKPVAWDEPRMAADIGDLGAGLGNLLEDKDGRFRSASPDLSRDALAIGGLDDQGSSVMNPGRTSWGVEAGR

SEQ ID NO: 1541 - protein, 947 aa, Oryza sativa
MSSPLSPFLLPPFSLSLFLFSPLRLATGSTSGWSWSGGGRGQSSGGGSLSIGLAKWREEMRGEQRQRRARRRPACMARRGEGRWAATRGQAGGRCARGARGGGGDGGETGAGGHGGEASHGRKRRGEDGGWRTKARVGSWSGVGMRTGRSKRGGRGRQRRRRRRPFPRPPLAISSAPTFCPGGLPPQRHARHSLPVACCTEGRAANGGRRRVGAGGGRRTAMRGGGRSRALRRSTRTSTTSPMLTTCWCLAAVPPLLAWWSSCVGDANAAITGEAATGNGVALADGDGEAAAQEERGEQDEVVHGAVVGLGLHAVEGVHGGQLSDLATDAIELPIHLQLGVSPTCASWKGRTAMNKPYRHSRARSLARPSDNDATAKPKLPDVDAGSSNRDSLVTTVADMAPIRDDMVIFQQYEREEWLLGTPYPDVFPGSYQDEPDGEAGRAGLRRRQAVDEVAARREEPQGGAPHDDERGERGKCSMWTLWTHSQLVVVGWLLKRRPPTKLSELESQLSQLQDELKKAKEQLLSTEHSKRRALQEAEDARAQAAAASAQVRDSEAQLAELSSAEESRLLELRRLSQERDRSWQSELEAMQKQHAADSAALVAAMGEVHRLRVQLAAAARADRKQDVVEAMATIDELRVKLKASEEAEAQARALHEECKQQLETSRATIDSLLTDGSKLMDSFSLVVKELEESRAKVKALEEEIAETSAAKAGERCNCSASASASEVAELRSELESTEARFQEERILSTVETQCAYELMDQIKMESDSRHGKLAAALESTKSEVIFLKASLFDKDSELRRALDANEKLQSETRTDNELKEQLQGALLENGQLKRELQQHTSEKKASAKATDAADAAAEAAKKGEMEAELRRLRVQAEQWRKAAETAMALLTVGKGGNGKVVDRSESLEGGGGGGGKYAGLWDELDDDAAARKNGNVLRRISGMWKK

SEQ ID NO: 1542 - protein, 583 aa, Thermoanaerobacter tengcongensis
MRRTKIVCTIGPASEDYNILRKLIEKGMNVARLNFSHGDFEEHGARIDNIKKIREELGLPVAILLDTKGPEIRTGKFKNGGVELKEGQTFTLTTRDVIGDETVVSVSYKGLPQDVSRGTQILIDDGLISLRVVDVKGEDIICVVENSGFLGDHKGVNVPGVKLNLPALTQKDIEDIEFGIKKGIDMIAASFVRKAADVLAIRRLLEDNKADHIQIIAKIENREGVENIDEIIRVSDGIMVARGDLGVEIPLEEIPIVQKMIIKKCNEAGKPVITATQMLDSMMRNPRPTRAEVTDVANAILDGTDAIMLSGETAQGKYPVEAFETMARIAEKTEVYVQYRDIVGVGTERNVSITNAISHATCTTARDIGASAIITCTKSGYTARMVSRYRPSSPIIATTPSEQVARKLSIVWGVYPLVTKEVSTTDEMIDVAIESALKAGLIRNGDIVVISAGIPVAMTGTTNMLKVHIVGDVILRGIGIGSKSTTGTVCIIHDIGKDRDKFREGDIIVTTKTERDFMPLIEKASAIITEEGGLTSHAAIVGLNLGIPVIVGCEGATSKLQDGMTVTVDTTRGLVYKGIVNIK

SEQ ID NO: 1543 - protein, 444 aa, Methanosarcina mazei
MSLANLRTHYTADVRPDKVENGQKVTLAGWVHEVRDLGGICFVVLRDREGKAQVTLVKKKIDKDLFDAARRLVRESVISVTGSVKFEEKAPNGYELLPDEINVLNVSGSPLPMDTTGKVEAELDTRLDSRFIDLRRAETTAVFKIRHESLRAIREYFVKYNFIETATPKVVATATEGGTALFPITYFDREAFLNQSPQLFKQILMSGGFDRVFEIGPIFRAEEHDTRRHLNEATSIDVEVSFADHFDVMELLENLVAYVYTRVIENCKSSLEVLGVDLKVPKTPFLKLTYDEVIEIINSRCEEKMHWGDDLGTLGEHTVGDHVYETTGESHYFIIDWPTEIKPFYAMPYEDRPEFSKSFDMMHRTMELSSGAQRIHIPSLLKNRIESQGLNPDGFEFYLKAFEFGMPPHAGWGMGCERFVMTMLGTENIRDTVLFPRDRRRLSP

SEQ ID NO: 1544 - protein, 238 aa, Cicer arietinum
FDKGARTALAFVTLRADGEREFMFYRNPSADMLLTPEDLNLELIRSAKVFHYGSISLIVEPCRSAHLKAMEVAKDAGCLLSYDPNLRLPLWPSPEEARNQILSIWDKADLIKVSDVELEFLTGSDKIDDASALSLWHPNLKLLLVTLGENGSRYYTKNFHGSVDAFHVNTVDTTGAGDSFVGALLGKIVDDQSILEDEARLREVLKFANACGAITTTKKGAIPALPTEADVLSLIKGE

SEQ ID NO: 1545 - protein, 120 aa, Listeria monocytogenes
MALNIEEIIASVKEASVLELNDLVKAIEEEFGVTAAAPVAVAAAGGAAAEQTEFTVELASAGDSKIKVIKVVREITGLGLKEAKELVDNAPKALKEGIAKDEAEEIKAKLEEVGANVEVK

SEQ ID NO: 1546 - protein, 125 aa, Mesorhizobium loti
MADLAKIVDDLSKLTVLEAAELSKLLEEKWGVSAAAPVAVAAAGGAAAAAAPAEEKTEFDVVLTDAGAQKINVIKEVRAITGLGLKEAKDLVEAAPKPVKEGVSKADADKFKAQLEAAGAKVDLK

SEQ ID NO: 1547 - protein, 364 aa, Pennisetum glaucum
DNYMEEAFKMRNLLEEFLITHGKSKPTILGAREHIFTGSVSSLAWFMSNQETSFVTIGQRVLANQLKVRFHYGHPDVFDRLFHLTRGGISKASKVMNLSEDIFAGFNSTLRQGNVTHHEYIQLGKGRDVGMNQISNFEAKVANGNGEQTLCRDIYRLGHRFDFFRMLSMYFTTVGFYFNSMVAVLTVYVFLYGRLYLVLSGLEKSILQDPNIQNIKPFENALATQSVFQLGMLLVLPMMMEVGLEKGFGRALAEFVIMQLQLAPVFFTFHLGTKTHYYGRTILHGGAKYRGTGRGFVVRHAKYAENYRMYSRSHFVKALELFILLVVYLAYGSSYRSSSLYLYVTVSIWFLVFCWLFAPFLFNP

SEQ ID NO: 1548 - protein, 336 aa, Xanthomonas axonopodis
MSRPSLTRFLIEEQHAGRIDAELRQLITIVSRACKRISIAVSKGALGGVLGDAGTGNVQGEAQKKLDVLSNDILLEANAWGGHLAACASEEMDHSQPVPDQYPSGDFLLLFDPLDGSSNIDVNVSVGTIFSVLRAPKGTEKPGDEHFLQPGTQQVAAGYCIYGPSTMLVLTLGHGTHAFTLEREEGSFLLTQANMRVPEDTAEYAINMSNQRHWEPAMQAYVGDLLAGKDGARGKDFNMRWIASMVADVHRILTRGGIFIYPWDKKDPSKPGKLRLMYEANPMSMLVEQAGGAATTGRERILDIQPTQLHQRVPVFLGSKNEVAEATRYHLDADKA

SEQ ID NO: 1549 - protein, 484 aa, Xanthomonas axonopodis
MLRSLIVCCRVRMSYAIVWFRRDLRLEDNPALRAALDAGHHPIPLYIDAPHEEGEWTPGAASRTWRHRSLAALDGALRALGSGLVIRVGNSAQVLDEVIAQTGAVAVYWNRKYEPATQPRDAQIKRDLRERGIEVQSCNCALLFEPWQLSTQQGGPYKVFTPFWRNALTQLQLPAAIGAPRSLPPLPASLKTDALDTLQLVPGLQWDQGFWEHWQPGEAGAHEMLEIFIDGALSGYRENRDRPDRVGTSQLSPHLHFGEIAPWRIANTLETHRTARNGAEIDAYIRQLGWRDFAYHLLHHFPDTTNQNLNPRFAGFDWATVDPVALQAWQRGRTGIPIVDAGMRQLWHTGWMHNRVRMIVASFLCKHLRIHWIEGARWFWDTLVDADLANNTLGWQWVAGTGADAAPYFRVFNPVTQAEKFDPQAAYITRWVPELGKLAVKERFAPWLHPLSLARLAPEYPRTPIIGLAEGRDAALAAYAKTRG

SEQ ID NO: 1550 - protein, 641 aa, Xanthomonas axonopodis
MGKIIGIDLGTTNSCVSIMDGGKARVIENSEGDRTTPSIVAYTKDGEVLVGASAKRQAVTNPKNTFYAVKRLIGRKFTDGEVQKDISHVPYGILAHDNGDAWVQTSDGKRMAPQEISARVLEKMKKTAEDFLGEKVTEAVITVPAYFNDSQRQATKDAGRIAGLDVKRIINEPTAAALAYGLDKNGGDRKIAVYDLGGGTFDVSIIEIAEVDGEKQFEVLATNGDTFLGGEDFDNRVIEYLVDEFNKDQGIDLRKDPLALQRLKDAAERAKIELSSSQQTEVNLPYVTADASGPKHLNIKLTRAKLEALVEDLVKKSIEPCRTALNDAGLRASDINEVILVGGQTRMPKVQQAVADFFGKEPRKDVNPDEAVAVGAAIQGGVLAGDVKDVLLLDVTPLSLGIETMGGVFTKIIEKNTTIPTKASQTFSTAEDNQSAVTVHVLQGEREQARFNKSLAKFDLSGIEPAPRGMPQVEVSFDIDANGILHVSAKDKKTNKEQKVEIKAGSGLSDEEIQRMVADAEANREEDKKFQELVQARNQADGLIHATRTAITEHGSKVGGDVIGKVEAALSDLETAMKGDDKAQIEARTKTLEEAGQSLYAAAAAAEQGGNADAASGNAQASKAADDVVDAEFTEVKDDKK

SEQ ID NO: 1551 - protein, 510 aa, Xanthomonas axonopodis
MSADLLKALDLAASNSGTYLGEATWSQATGAGVLQPLNPTTNAVIAEVQATTPEDYELIVQRAQAAFKVWRTTPAPRRGEAVRLCGEALRAHKDALGSLVALEMGKSKPEGDGEVQEMIDIADFAVGQSRMLYGYTMHSERPGHRMYEQYQPLGLVGIISAFNFPVAVWAWNAFLAAICGDICIWKPSNKTPLTAIATMKICNAALKDAGFPDIFFLINDAGTALSEKLVEDTRVPLISFTGSTQIGRVVAEKVARRLGRCLLELGGNNAIILDETADLKLAIPGIVFGAVGTAGQRCTTTRRLIVHASIYDTVLATLVKAYKQLDSKIGDPTDPANLMGPLNSQGAVAQFLDSIAKAKAAGGTVEVGGTAIDRPGNFVLPAIVTGLQNSDAVVQHETFAPILYVMKYSTLDEAIELQNGVPQGLSSSIFTQNLKAAEKFLSAAGSDCGIANVNIGTSGAEIGGAFGGEKETGGGRESGSDAWKVYMRRQTNTINYSDSLPLAQGIKFDL

SEQ ID NO: 1552 - protein, 428 aa, Xanthomonas campestris
MSEDRQGRSGDSNKILYCSFCGKSQHEVRKLIAGPSVFICDECVELCNDIIREELEEKAQSARSSLPKPREILEVLDQYVIGQLRAKRTLAVAVYNHYKRIESRSKNDEVELAKSNILLVGPTGSGKTLLAETLARLLNVPFTIADATTLTEAGYVGEDVENIIQKLLQKCDYDVEKAQQGIVYIDEIDKISRKSENPSITRDVSGEGVQQALLKLIEGTVASVPPQGGRKHPQQEFLQVDTKNILFICGGAFAGLDKVIQARSNDAGGIGFGAKVKSSERKQEVGKILAEVEPEDLIKFGLIPEFVGRLPVVATLEELDEPALIKILTEPKNAITKQFKKLFEMESVELEFRPDALSAIAKKALKRKTGARGLRTIVESVLLDTMYELPSQENVSKVVVDESVIEHKSEPYLIYQAQPAPAKAASGD

SEQ ID NO: 1553 - protein, 642 aa, Xanthomonas campestris
MGKIIGIDLGTTNSCVAIMDGGKARVIENSEGDRTTPSIVAYTKDGEVLVGASAKRQAVTNPKNTFYAVKRLIGRKFTDGEVQKDISHVPYGILAHDNGDAWVQTSDSKRMAPQEISARVLEKMKKTAEDFLGEKVTEAVITVPAYFNDSQRQATKDAGRIAGLDVKRIINEPTAAALAYGLDKNGGDRKIAVYDLGGGTFDVSIIEIAEVDGEKQFEVLATNGDTFLGGEDFDNRVIEYLVDEFNKDQGIDLRKDPLALQRLKDAAERAKIELSTSQQTEVNLPYVTADASGPKHLNIKLTRAKLEALVEDLVKKSIEPCRTALNDAGLRASDINEVILVGGQTRMPKVQQAVADFFGKEPRKDVNPDEAVAVGAAIQGGVLAGDVKDVLLLDVTPLSLGIETMGGVFTKIIEKNTTIPTKASQTFSTAEDNQSAVTVHVLQGEREQARFNKSLAKFDLSGIEPAPRGMPQVEVSFDIDANGILHVSAKDKKTNKEQKVEIKAGSGLSDEEIQRMVADAEANREEDKKFQELVQTRNQADGLIHATRTAITEHGSKVGGDVIGKVEAALADLETAMKGDDKAQIEARSKTLEEAGQSLYAAAAAAEQGGNADAASGNAQASKAADDVVDAEFTEVKDDKKA

SEQ ID NO: 1554 - protein, 317 aa, Candida albicans
MVELSDYQRQEKVGEGTYGVVYKALDTKHNNRVVALKKIRLESEDEGVPSTAIREISLLKEMKDDNIVRLYDIIHSDSHKLYLVFEFLDLDLKKYMESIPQGVGLGANMIKRFMNQLIRGIKHCHSHRVLHRDLKPQNLLIDKEGNLKLADFGLARAFGVPLRAYTHEVVTLWYRAPEILLGGKQYSTGVDMWSVGCIFAEMCNRKPLFPGDSEIDEIFRIFRILGTPNEEIWPDVNYLPDFKSSFPQWKKKPLSEAVPSLDANGIDLLDQMLVYDPSRRISAKRALIHPYFNDNDDRDHNNYNEDNIGIDKHQNMQ

SEQ ID NO: 1555 - protein, 506 aa, Saccharomyces cerevisiae
MPESRLQRLANLKIGTPQQLRRTSIIGTIGPKTNSCEAITALRKAGLNIIRLNFSHGSYEFHQSVIENAVKSEQQFPGRPLAIALDTKGPEIRTGRTLNDQDLYIPVDHQMIFTTDASFANTSNDKIMYIDYANLTKVIVPGRFIYVDDGILSFKVLQIIDESNLRVQAVNSGYIASHKGVNLPNTDVDLPPLSAKDMKDLQFGVRNGIHIVFASFIRTSEDVLSIRKALGSEGQDIKIISKIENQQGLDNFDEILEVTDGVMIARGDLGIEILAPEVLAIQKKLIAKCNLAGKPVICATQMLDSMTHNPRPTRAEVSDVGNAVLDGADCVMLSGETAKGDYPVNAVNIMAATALIAESTIAHLALYDDLRDATPKPTSTTETVAAAATAAILEQDGKAIVVLSTTGNTARLLSKYRPSCPIILVTRHARTARIAHLYRGVFPFLYEPKRLDDWGEDVHRRLKFGVEMARSFGMVDNGDTVVSIQGFKGGVGHSNTLRISTVGQEF

SEQ ID NO: 1556 - protein, 605 aa, Bacillus megaterium
MSKIIGIDLGTTNSCVAVLEGGEPKVIPNPEGNRTTPSVVAFKNGERQVGEVAKRQAITNPNTIISVKRHMGTDHKVEAEGKQYTPQEMSAIILQHLKGYAEEYLGEPVTKAVITVPAYFNDAERQATKDAGKIAGLEVERIINEPTAAALAYGLEKTDEDQTVLVYDLGGGTFDVSILELGDGVFEVRATAGDNRLGGDDFDQVIIDYLVAEFKKENGVDLSKDKMALQRLKDAAEKAKKDLSGVTSTQISLPFITAGEAGPLHLEVSLSRAKFDELSAGLVERTMAPVRQALKDAGLSASELDKVILVGGSTRIPAVQDAIKKETGQDPHKGVNPDEVVALGAAIQGGVLTGDVKDVVLLDVTPLSLGIETMGGVFTKLIERNTTIPTSKSQVFSTAADSQTAVDIHVLQGERPMSADNKTLGRFQLTDIPPAPRGVPQIEVSFDIDKNGIVNVRAKDLGTNKEQAITIKSSTGLSDDEIDRMVKEAEENADADKQRKEEVELRNEADQLVFTTEKTLKDLEGKVEEAEVTKANEAKDALKAAIEKNDLEEIKAKKDELQEIVQALTVKLYEQAQQAQQAGEQGAQNDDVVDAEFEEVNDDKK

SEQ ID NO: 1557 - protein, 674 aa, Schizosaccharomyces pombe
MISSRFTNVVRSGLRFQSKGASFKIGASLHGSRMTARWNSNASGNEKVKGPVIGIDLGTTTSCLAIMEGQTPKVIANAEGTRTTPSVVAFTKDGERLVGVSAKRQAVINPENTFFATKRLIGRRFKEPEVQRDIKEVPYKIVEHSNGDAWLEARGKTYSPSQIGGFILSKMRETASTYLGKDVKNAVVTVPAYFNDSQRQATKAAGAIAGLNVLRVVNEPTAAALAYGLDKKNDAIVAVFDLGGGTFDISILELNNGVFEVRSTNGDTHLGGEDFDVALVRHIVETFKKNEGLDLSKDRLAVQRIREAAEKAKCELSSLSKTDISLPFITADATGPKHINMEISRAQFEKLVDPLVRRTIDPCKRALKDANLQTSEINEVILVGGMTRMPRVVETVKSIFKREPAKSVNPDEAVAIGAAIQGGVLSGHVKDLVLLDVTPLSLGIETLGGVFTRLINRNTTIPTRKSQVFSTAADGQTAVEIRVFQGERELVRDNKLIGNFQLTGIAPAPKGQPQIEVSFDVDADGIINVSARDKATNKDSSITVAGSSGLTDSEIEAMVADAEKYRASDMARKEAIENGNRAESVCTDIESNLDIHKDKLDQQAVEDLRSKITDLRETVAKVNAGDEGITSEDMKKKIDEIQQLSLKVFESVYKNQNQGNESSGDNSAPEGDKK

SEQ ID NO: 1558 - protein, 608 aa, Geobacillus stearothermophilus
MSKIIGIDLGTTNSCVAVLEGGEPKVIPNPEGNRTTPSVVAFKNGERLVGEVAKRQAITNPNTVISIKRHMGTDYKVEIEGKKYTPQEISAIILQYLKSYAEDYLGEPVTRAVITVPAYFNDAQRQATKDAGRIAGLEVERIINEPTAAALAYGLDKEEDQTILVYDLGGGTFDVSILELGDGVFEVKATAGDNHLGGDDFDQVIIDYLVDQFKQEHGIDLSKDKMALQRLKDAAEKAKKELSGVTQTQISLPFISANENGPLHLETTLTRAKFEELFAHLVERTMGPVRQALQDAGLTPEDIDKIILVGGSTRIPAVQEAIKRELGKEPHKGVNPDEVVAIGAAIQGGVIAGEVKDVVLLDVTPLSLGIETMGGVFTKLIERNTTIPTSKSQIFTTAADNQTTVDIHVLQGERPMAADNKTLGRFQLTGYPPAPRGVPQIEVTFDIDANGIVHVRAKDLGTNKEQSITIKSSSGLSEEEIQRMIKEAEENAEADRKRKEAAELRNEADQLIFTTEKTLKEVEGKVDEAEVKKAREAKDALKAALEKNDLDEIRKKKEALQEAVQQLSIKLYEQAAKQAQNQQAGADGATKKDDNIVDAEFEEVKDDK

SEQ ID NO: 1559 - protein, 633 aa, Agrobacterium tumefaciens
MAKVIGIDLGTTNSCVAVMDGKDTKVIENAEGARTTPSMVAFSDDGERLVGQPAKRQAVTNPTNTLFAVKRLIGRRYEDPTVEKDKALVPFEIVKGDNGDAWVKAQDKNYSPSQISAMILQKMKETAESYLGEKVEKAVITVPAYFNDAQRQATKDAGRIAGLDVLRIINEPTAAALAYGLDKKEGKTIAVYDLGGGTFDISVLEIGDGVFEVKSTNGDTFLGGEDFDMRLVEYLAGEFKKDQGIDLKNDKLALQRLKEAAEKAKIELSSSQQTEINLPFITADASGPKHLTPKLTRAKFESLVDDLVQRTVAPCKAALKDAGVTAAEIDEVVLVGGMSRMPKVREVVKQLFGKEPHKGVNPDEVVAMGAAIQAGVLQGDVKDVLLLDVTPLSLGIETLGGVFTRLIDRNTTIPTKKSQTFSTAEDNQSAVTIRVSQGEREMAQDNKLLGQFDLVGLPPSPRAVPQIEVTFDIDANGIVQVSAKDKGTGKEQQIRIQASGGLSDADIEKMVKDAEANAEADKKRRAGVEAKNQAESLIHSTEKSVKEYGDKVSETDRKAIEDAIASLKTAVEAAEPDADDIQAKTQTLMEVSMKLGQAIYEAQQAEAGDASAEGKDDVVDADYEEIKDDKKSA

SEQ ID NO: 1560 - protein, 420 aa, Staphylococcus aureus
MFKFNEDEENLKCSFCGKDQDQVKKLVAGSGVYICNECIELCSEIVEEELAQNTSEAMTELPTPKEIMDHLNEYVIGQEKAKKSLAVAVYNHYKRIQQLGPKEDDVELQKSNIALIGPTGSGKTLLAQTLAKTLNVPFAIADATSLTEAGYVGDDVENILLRLIQAADFDIDKAEKGIIYVDEIDKIARKSENTSITRDVSGEGVQQALLKILEGTTASVPPQGGRKHPNQEMIQIDTTNILFILGGAFDGIEEVIKRRLGEKVIGFSSNEADKYDEQALLAQIRPEDLQAYGLIPEFIGRVPIVANLETLDVTALKNILTQPKNALVKQYTKMLELDNVDLEFTEEALSAISEKAIERKTGARGLRSIIEESLIDIMFDVPSNENVTKVVITAQTINEETEPELYDAEGNLINNSKTSA

SEQ ID NO: 1561 - protein, 428 aa, Streptomyces coelicolor
MARIGDGGDLLKCSFCGKSQKQVKKLIAGPGVYICDECIDLCNEIIEEELAETSEVRWEELPKPREIYEFLESYVVGQEAAKKALSVAVYNHYKRVQAGENGGAQGREDAIELAKSNILLLGPTGSGKTLLAQTLARMLNVPFAIADATALTEAGYVGEDVENILLKLIQAADYDVKKAETGIIYIDEIDKVARKSENPSITRDVSGEGVQQALLKILEGTTASVPPQGGRKHPHQEFIQIDTTNVLFIVGGAFAGLEKIIEGRAGAKGIGFGAQIRSKREIESKDQFEQVMPEDLVKFGMIPEFIGRLPVITSVHNLDREALLQILVEPRNALVKQYERLFELDGVELDFERGALEAIADQAILRQTGARGLRAIMEEVLQGVMYEVPSRKDVARVVITADVVLSNVNPTLIPRDSRGRGPGEQKTA

SEQ ID NO: 1562 - protein, 476 aa, Streptomyces coelicolor
MRRSKIVCTLGPAVDSHEQLVTLIEAGMNVARFNFSHGTHAEHQGRYDRVRAAAKETGRAIGVLADLQGPKIRLETFAEGPVELVRGDEFTITAEDVPGDRTICGTTYKGLPGDVTKGDQVLINDGNVELKVTEVEGPRVKTIVIEGGVISDHKGINLPGAAVNVPALSEKDVEDLRFALRMGCDLVALSFVRDAKDVADVHRVMDEEGRRVPVIAKVEKPQAVDNMEDVVMAFDGVMVARGDLAVEYPLEKVPMVQKRLIELCRRNAKPVIVATQMMESMITNSRPTRAEASDVANAILDGADAVMLSAESSVGAYPIETVKTMSKIVTAAEQELLSKGLQPLVPGKKPRTQGGSVARAAAEIADFLGGKGLVAFTQSGDTARRLSRYRAAQPILAFTTDESTRNQLALSWGVEPHVVPFVNTTDEMVDLVDQETARLGRFSDGDTVVITAGSPPGVSGTTNMVRVLHLGETRRG

SEQ ID NO: 1563 - protein, 477 aa, Methanosarcina mazei
MEIPDHKTKIVCTIGPASSSEEMIRKLMLAGMNVARINFSHGDFESHSRVVRIIRKVADELGRTIAILADLPGPKIRIGKLEKEPVMLHKGNPITLTIDDTPGNEERIPVSYKQLPESVTPGSLIYLSDGFIQLLCKEVTGKDVLCEVLIGGELYSHKGLNLPGAKIFLDAVTEKDFRILEFALEEDIDTFSISFVENAEDIRKVRNFAASRGKQVNIVSKIERRQAVENIGEILDETDALMVARGDLGVEIPIQEVPSVQKELIQRAKLLGVPVITATHMLASMTDNIRPTRAEATDVANAILDGTDAVMLSEETAVGNYPVEAVEMMAKIAKTTENWRSRTKWGLDTMIKSITAREMSVDEVITLQVYEALQKLPVAAVLTPTRSGATPRRISRFNPDPWILAFSRVPKTCRFLSLSYGVYPVAVNESIESWEKETTERTKELGFAKSKDLVIFTQGPASGKPGGTNMLKILTLD

SEQ ID NO: 1564 - protein, 340 aa, Methanosarcina mazei
MWRLRMSLGISEAFDLRPDYIISVIKDTRAKLVGFQFPEGLKRKGPELAKKVEKATGAEIIISGDPCFGACDLDRTLLDHVDILFHFGHAELEDIRLSNKVYFIETRSSVDVLHVIEKAVPELKGQKIGLITTVQHVHKLPDVCGVLERMGKTCVIGRGDSRIAYAGQVLGCNFSAARDEDCDEYLYIGSGDFHPLGVALSTKKRVLAADPFSGEVREVDPSRILRQRSAVIAKSLDAQVFGIIVSSKNGQKRMELASSLKELAKKHGKESHLILIDLVTPDQLLQFKVDAFVNTACPRLAIDEVGRFPAPMLTPQEFEIVLGEREWEKLVLDEITEEPV

SEQ ID NO: 1565 - protein, 338 aa, Xanthomonas campestris
MSRPSLTRFLIEEQHAGRIDPELRQLITIVSRACKRISIAVSKGALGGVLGDAGTGNVQGEAQKKLDVLSNDILLEANAWGGHLAACASEEMDHSQPVPDQYPSGDFLLLFDPLDGSSNIDVNVSVGTIFSVLRAPKGTEKPGDEHFLQPGTQQVAAGYCIYGPSTMLVLTLGHGTHAFTLEREEGSFLLTQADMRVPEDTAEFAINMSNQRHWEPAMQAYVGDLLAGKDGARGKDFNMRWIASMVADVHRILTRGGIFIYPWDKKDAAKPGKLRLMYEANPMGMLVEQAGGAATTGRERILDIQPTQLHQRVPVFLGSKNEVAEATRYHVEFDKAQG

SEQ ID NO: 1566 - protein, 484 aa, Xanthomonas campestris
MLRGLTCRCRVCMSYAIVWFRRDLRLEDNPALRAALDAGHDPIPLYIDAPHEEGQWAPGAASRAWRHRSLAALDASLRARGSALLIRQGDSAQVLDAVIAQTEAVAVYWNRKYEPATQPRDAQIKRSLRERGLEVQSCNAALLFEPWTLATQQGRPYKVFTPFWRNALTQLRLPDAMPAPRSLPPLPASLDGVHVDALNLLPTPAWDQGFWEHWQPGEAGAHEMLEIFVDGALSGYRENRDRPDRVGTSQLSPHLHFGEIAPWRIASTLEAQRSARNGADIDGYIRQLGWRDFAYHLLHHFPDTTTQNLNPRFAGFDWATVDPVTLDAWQRGRTGIPIVDAGLRQLWHTGWMHNRVRMIVASLLCKHLRVHWLEGARWFWDTLVDADLANNTMGWQWVAGTGADAAPYFRVFNPVTQAEKFDPQATYITRWIPELAALPVKERFAPWLHPLSLARLAPTYPRAPIIGLAEGRDAALAAYAGTRG

SEQ ID NO: 1567 - protein, 510 aa, Xanthomonas campestris
MSADLLKALDLAPSNAGTYLGEGTWSQATGAGVLQPLNPTTNAVIADVQATTPQDYELIVARAQAAFKVWRTTPAPRRGEAVRLCGEALRAHKDALGSLVALEMGKSKPEGDGEVQEMIDIADFAVGQSRMLYGYTMHSERPGHRMYEQYQPLGLVGIISAFNFPVAVWAWNAFLAAICGDICIWKPSNKTPLTAIATMKICNAALKEAGFPDIFFLINDAGTSLSEKLVEDGRVPLISFTGSTQIGRVVAEKVARRLGRCLLELGGNNAIILDETADLKLAVPGIVFGAVGTAGQRCTTTRRLIVHESIYDNVLATLVKAYKQLDSKIGDPTDPANLMGPLNSRGAVEQFLESIAKAKAAGGTVEVGGTAIDRPGNFVLPAIVTGLKNSDAVVQHETFAPILYVMKYSTLDEAIDLQNGVPQGLSSSIFTQNLKAAEKFLSAAGSDCGIANVNIGTSGAEIGGAFGGEKETGGGRESGSDAWKVYMRRQTNTINYSDSLPLAQGIKFDL

SEQ ID NO: 1568 - protein, 508 aa, Xanthomonas campestris
MPSSVRDACVKFRGFYREAIMKERQRRTKILATLGPATDPPGVLDALFKAGVNVVRLNFSHGDPSGQAKRAAEVRAAAVRVGAEVGILADLPGPKIRIERFAGGKIKLTMGDRFDLVADINAPAGDQHQVGVSYLGLPQDVTAGDVLLLDDGLVQLQVTDVQGARIVTTVLNDGVLSDRKGLNKQGGGLSLGALTERDKELIGIVAKIGVDFIAVSFCRNAQDMHDARQIAQQHGCDAQLVSKIERTEAIENLVEIVEASDVVMVARGDLGVEIGDAELPGLQKKIIRESLAQNKVVITATQMLQSMVESPIPTRAEVLDVANAVIDGTDAVMLSAETAAGAYPVRAVEAMARICLGAEHQFEFDTDFEAAQRNLQRADQAIAMATMFLSEHIGLGGVVALTESGGTPRYLSRFRSNMPIYAFTRHDGARRQMAMMRGVFPIGFDSRGLTPREAARAAIRLLVENERMGPGDRVVFTSGEHMETHGATNTLRLLEVGEDGRASGLGEL

SEQ ID NO: 1569 - protein, 428 aa, Xanthomonas axonopodis
MSEDRQGRSGDSNKILYCSFCGKSQHEVRKLIAGPSVFICDECVELCNDIIREELEEKAQSARSSLPKPREILEVLDQYVIGQLRAKRTLAVAVYNHYKRIESRSKNDDVELAKSNILLVGPTGSGKTLLAETLARLLNVPFTIADATTLTEAGYVGEDVENIIQKLLQKCDYDVEKAQQGIVYIDEIDKISRKSENPSITRDVSGEGVQQALLKLIEGTVASVPPQGGRKHPQQEFLQVDTKNILFICGGAFAGLDKVIQQRSNDAGGIGFGAKVKSSERKQEVGKILAEVEPEDLIKFGLIPEFVGRLPVVATLEELDEPALIKILTEPKNAITKQFKKLFDMEGVELEFRPDALSAIAKKALKRKTGARGLRTIVESVLLDTMYELPSQENVSKVVVDESVIEHKSEPYLIYQAQPAPAKAASGD

SEQ ID NO: 1570 - protein, 501 aa, Xanthomonas axonopodis
MCVKFRGFYREAIMKERQRRTKILATLGPATDAPGVLDTLFKAGVNVVRLNFSHGDPSGQAKRAAEVRAAAARVGAEVGILADLPGPKIRIERFAEGKIKLTMGDRFDLVADANAPAGDQTQVGVSYLGLPQDVTAGDVLLLDDGLMQLQVTDVQGARIVTKVLNDGVLSDRKGLNKQGGGLSLGALTERDKELIGIVAKIGVDFIAVSFCRNAQDMHDARQIAQQHGCDAQLVSKIERTEAIENLVEIVEASDVVMVARGDLGVEIGDAELPGLQKKIIRESLAQNKVVITATQMLQSMVESPIPTRAEVLDVANAVIDGTDAVMLSAETAAGAYPVRAVEAMARICLGAEHQFEFDTDFEAAQRNLQRADQAIAMATMFLSEHIGLGGVVALTESGGTPRFLSRFRSNMPIYAFTRHDGARRQMAMMRGVFPISFDSRGLTPREAARAAIRLLVENERMGPGDRVVFTSGEHMETHGATNTLRLLEVGEDGRATGLGEL

SEQ ID NO: 1571 - protein, 419 aa, Listeria monocytogenes
MFKFNDEKGQLKCSFCGKTQDQVRKLVAGPGVYICDECIELCNEIIEEELGISEFVDFGEVPKPQEIRHILSDYVIGQERAKKALAVAVYNHYKRINSNETKEDEVELSKSNICLIGPTGSGKTLLAQTLARILNVPFAIADATSLTEAGYVGEDVENILLKLIQSADYDVEKAEKGIIYIDEIDKVARKSENPSITRDVSGEGVQQALLKILEGTVASVPPQGGRKHPHQELIQIDTGNILFIVGGAFDGIEQIVKNRMGEKVIGFGTDNAKLKDDETYLSRVVPEDLLKFGLIPEFIGRLPVIATLEQLDEAALVSILTEPKNALVKQYKRMLELDDVELEFEPTALIEIAKEAIERKTGARGLRSIIEQIMLEVMFEIPSRDDITKCIITEKAARGEEEPQLQLEDGSIIPIKTSA

SEQ ID NO: 1572 - protein, 419 aa, Listeria innocua
MFKFNDEKGQLKCSFCGKTQDQVRKLVAGPGVYICDECIELCNEIIEEELGISEFVDFGEVPKPQEIRHILSDYVIGQERAKKALAVAVYNHYKRINSNETKEDEVELSKSNICLIGPTGSGKTLLAQTLARILNVPFAIADATSLTEAGYVGEDVENILLKLIQSADYDVEKAEKGIIYIDEIDKVARKSENPSITRDVSGEGVQQALLKILEGTVASVPPQGGRKHPHQELIQIDTGNILFIVGGAFDGIEQIVKNRMGEKVIGFGTDNAKLKEDETYLSRVVPEDLLKFGLIPEFIGRLPVIATLEQLDEAALVSILTEPKNALVKQYKRMLELDDVELEFEPTALIEIAKEAIERKTGARGLRSIIEQIMLEVMFEIPSRDDITKCIITEKAARGEEEPQLQLEDGSIIPIKTSA

SEQ ID NO: 1573 - protein, 425 aa, Sinorhizobium meliloti
MSKVSGSNGGDSKNTLYCSFCGKSQHEVRKLIAGPTVFICDECVELCMDIIREENKTSMVKSRDGVPTPQEIIKVLDEYVIGQQQAKRILSVAVHNHYKRLAHAAKSSDVELAKSNIMLVGPTGCGKTYLAQTLARIIDVPFTMADATTLTEAGYVGEDVENIILKLLQAADYNVERAQRGIVYIDEVDKISRKSDNPSITRDVSGEGVQQALLKIMEGTVASVPPQGGRKHPQQEFLQVDTTNILFICGGAFAGLDKIISARGEKTSIGFGATVRAPEDRRVGEVLRELEPEDLVKFGLIPEFIGRLPVLATLEDLDEDALIQILSEPKNALVKQYQRLFEMEDVELNFHEDALREIARRAIVRKTGARGLRSIMEKILLDTMFELPTLEGVREVVISDEVVKGTARPLYIYSERSEEKTNVSA

SEQ ID NO: 1574 - protein, 432 aa, Clostridium acetobutylicum
MAKYDNKKQLRCSFCGKSQDQVKRLIAGPGVYICDECIELCSEIIADEFEETPQINVGSLPKPSEIKDYLDQYVVGQEDAKKSLSVAVYNHYKRINSNLSNNDDIELQKSNILLLGPTGCGKTFLAQTLAKFLNVPFAIADATTLTEAGYVGEDVENILLKLIQNADYDVERAEKGIIYIDEIDKIARKSENPSITRDVSGEGVQQALLKILEGTVASVPPQGGRKHPHQEFIQINTTNILFICGGAFDGVDKIIENRTRVSTIGFGASIQSKQQKDIGAILKKIMPGDLLKFGLIPEFIGRLPIIVTLNSLDQGALVKVLSEPKNALVKQYEKLLQMDNVELEFKDGALKAIASEAISRSTGARGLRAIVEDIMKDIMFDIPSREDVKKVIVTENTINTKQPELVLEEGAKAIEAPKKKEKSKTKKDIESA

SEQ ID NO: 1575 - protein, 414 aa, Neisseria meningitidis
MSNENRTCSFCGKSKSHVKHLIEGENAFICDECVSNCIEILHEDGNDGTPSESAGGEPEESGKLPTPAEIVANLNDHVIGQEQAKKALAVSVYNHYKRLRHPKAGANVELSKSNILLIGPTGSGKTLLAQSLARKLDVPFVMADATTLTEAGYVGEDVEQIITKLLGKCDFDVEKAQRGIVYIDEIDKISRKSDNPSITRDVSGEGVQQALLKLIEGTVASVPPQGGRKHPNQEFINVDTTNILFICGGAFAGLEKVIRQRTEKGGIGFGASVHSKDENADITKLFGIVEPEDLIKFGLIPELIGRLPVIATLEELDEDALINILTEPKNALVKQYQALFGMENVELEFEEGALRSIARQAMERKTGARGLRSIVERCLLDTMYRLPDLKGLKKVVVGKAVIEEGREPELVFES

SEQ ID NO: 1576 - protein, 426 aa, Vibrio cholerae
MTDKSKEGGSSKLLYCSFCGKSQHEVRKLIAGPSVYICDECVDLCNDIIREEIKDVLPKKESAALPTPRKIREHLDDYVIGQEHAKKVLAVAVYNHYKRLRNGDTTSEGVELGKSNILLIGPTGSGKTLLAETLARLLDVPFTMADATTLTEAGYVGEDVENIIQKLLQKCDYDVAKAERGIVYIDEIDKISRKSENPSITRDVSGEGVQQALLKLIEGTVASVPPQGGRKHPQQEFLQVDTSKILFICGGAFAGLDKVIEQRVATGTGIGFGADVRSKDNSKTLSELFTQVEPEDLVKYGLIPEFIGRLPVTATLTELDEAALIQILCEPKNALTKQYAALFELENVDLEFREDALKAIAAKAMKRKTGARGLRSILEAVLLETMYELPSMEEVSKVVIDESVINGESAPLLIYSANESQAAGAE

SEQ ID NO: 1577 - protein, 637 aa, Brucella melitensis
MAKVIGIDMGTTNSCVAVMDGKNAKVIENAEGARTTPSIIAFTDGDERLAGQPAKRQAVTNPEGTLFAVKRLIGRRYDDPMVTKDKDLVPYKIVKGDNGDAWVEVHGKKYSPSQISAMILQKMKETAESYLGETVTQAVITVPAYFNDAQRQATKDAGKIAGLEVLRIINEPTAAALAYGLDKSEGKTIAVYDLGGGTFDVSVLEIGDGVFEVKSTNGDTFLGGEDFDIRLVEYLVAEFKKESGIDLKNDKLALQRLKEAAEKAKIELSSSQQTEINLPFITADQTGPKHLAIKLSRAKFESLVDDLVQRTVEPCKAALKDAGLKAGEIDEVVLVGGMTRMPKIQEVVKAFFGKEPHKGVNPDEVVAMGAAIQGGVLQGDVKDVLLLDVTPLSLGIETLGGVFTRLIERNTTIPTKKSQTFSTAEDNQSAVTIRVFQGEREMAADNKLLGQFDLVGIPPAPRGVPQIEVTFDIDANGIVNVSAKDKGTGKEHQIRIQASGGLSDADIEKMVKDAEANAEADKKRRESVEAKNQAESLVHSTEKSLAEYGDKVSADDKKAIEDAIAALKTSLEGEDAEDIKAKTQALAEVSMKLGQAMYEAAQAAEGAGAEGGEQASSSKDDVVDADYEEIDDNKKSS

SEQ ID NO: 1578 - protein, 414 aa, Staphylococcus aureus
MSQNKRVVITGMGALSPIGNDVKTTWENALKGVNGIDKITRIDTEPYSVHLAGELKNFNIEDHIDKKEARRMDRFTQYAIVAAREAVKDAQLDINENTADRIGVWIGSGIGGMETFEIAHKQLMDKGPRRVSPFFVPMLIPDMATGQVSIDLGAKGPNGATVTACATGTNSIGEAFKIVQRGDADAMITGGTEAPITHMAIAGFSASRALSTNDDIETACRPFQEGRDGFVMGEGAGILVIESLESAQARGANIYAEIVGYGTTGDAYHITAPAPEGEGGSRAMQAAMDDAGIEPKDVQYLNAHGTSTPVGDLNEVKAIKNTFGEAAKHLKVSSTKSMTGHLLGATGGIEAIFSALSIKDSKVAPTIHAVTPDPECDLDIVPNEAQDLDITYAMSNSLGFGGHNAVLVFKKFEA

SEQ ID NO: 1579 - protein, 610 aa, Staphylococcus aureus
MSKIIGIDLGTTNSCVTVLEGDEPKVIQNPEGSRTTPSVVAFKNGETQVGEVAKRQAITNPNTVQSIKRHMGTDYKVDIEGKSYTPQEISAMILQNLKNTAESYLGEKVDKAVITVPAYFNDAERQATKDAGKIAGLEVERIINEPTAAALAYGLDKTDKDEKVLVFDLGGGTFDVSILELGDGVFEVLSTAGDNKLGGDDFDQVIIDYLVAEFKKENGVDLSQDKMALQRLKDAAEKAKKDLSGVSQTQISLPFISAGENGPLHLEVNLTRSKFEELSDSLIRRTMEPTRQAMKDAGLTNSDIDEVILVGGSTRIPAVQEAVKKEIGKEPNKGVNPDEVVAMGAAIQGGVITGDVKDVVLLDVTPLSLGIEILGGRMNTLIERNTTIPTSKSQIYSTAVDNQPSVDVHVLQGERPMAADNKTLGRFQLTDIPPAERGKPQIEVTFDIDKNGIVNVTAKDLGTNKEQRITIQSSSSLSDEEIDRMVKDAEVNAEADKKRREEVDLRNEADSLVFQVEKTLTDLGENIGEEDKKSAEEKKDALKTALEGQDIEDIKSKKEELEKVIQELSAKVYEQAAQQQQQAQGANAGQNNDSTVEDAEFKEVKDDDKK

SEQ ID NO: 1580 - protein, 440 aa, Methanocaldococcus jannaschii
MENIMKKLIPILEKIPEVELPVKEITFKEKLKWTGIVLVLYFIMGCIDVYTAGAQIPAIFEFWQTITASRIGTLITLGIGPIVTAGIIMQLLVGSGIIQMDLSIPENRALFQGCQKLLSIIMCFVEAVLFVGAGAFGILTPLLAFLVIIQIAFGSIILIYLDEIVSKYGIGSGIGLFIAAGVSQTIFVGALGPEGYLWKFLNSLIQGVPNIEYIAPIIGTIIVFLMVVYAECMRVEIPLAHGRIKGAVGKYPIKFVYVSNIPVILAAALFANIQLWGLALYRMGIPILGHYEGGRAVDGIAYYLSTPYGLSSVISDPIHAIVYMIAMIITCVMFGIFWVETTGLDPKSMAKRIGSLGMAIKGFRKSEKAIEHRLKRYIPPLTVMSSAFVGFLATIANFIGALGGGTGVLLTVSIVYRMYEQLLREKVSELHPAIAKLLNK

SEQ ID NO: 1581 - protein, 228 aa, Vicia faba
PVYISIGCNLPAIPHPTFSRDPVPFSLAPRLSNQIGLEAAVEAAAEFLNKAVKPVLVGGPKLRVAKASDAFVELADASGYALAVMPSAKGMVPEHHPHFIGTYWGAVSTAFCAEIVESADAYLFAGPIFNDYSSVGYSLLLKKEKAIIVQPDRVVIANGPAFGCVLMNDFLKALAKRLKHNNVAYENYHRIFVPDGKPLKCVPKEPLRVNVMFQHIQKMLSSETAVIA

SEQ ID NO: 1582 - protein, 236 aa, Oryza sativa
MGRGKIEIKRIENTTNRQVTFCKRRNGLLKKAYELSVLCDAEVALIVFSSRGRLYEYANNSVKSTVERYKKANSDTSNSGTVAEVNAQHYQQESSKLRQQISSLQNANSRTIVGDSINTMSLRDLKQVENRLEKGIAKIRARKNELLYAEVEYMQKREVELQNDNMYLRSKVVENERGQQPLNMMGAASTSEYDHMVNNPYDSRNFLQVNIMQQPQHYAHQLQPTTLQLGQQPAFN

SEQ ID NO: 1583 - protein, 412 aa, Crambe kralikii
YHHSCTLFFILLLQFHHVFSTNTLSSNETLTISSNKTLVSPGDVFELGFFKTTQDGHDRWYLGTWYKTTSERTYVWIANRDNPLHNSMGTLKVSHANLVLLDQSDTPVWSSNLTGTAQLPVTAELLSNGNFVLRDSKTNDLNQSMWQSFDFPVDTLLPEMKLGRNLKTGHDRVLTSWKSPTDPSSGDYSFKLETQGLHEFYLLKNEFKVYRTGPWNGVRFNGIPKMQNWSYIVNNFIDTKEEVAYTFHVNNRNIHTRFRISSSGVLQVITWTSTVPQRNMFWSFPEDDCDMYQMCGPYAYCDMNTTPRCNCIKGFVHKNASAWDLRDMSGGCVRSSKLSCGGEGDGFLRMSQMKLPETSEAVVDERIGLEECKEKCVRDCNCTGFANVDNRNGGSGCVIWTGELVDMRNYVA

SEQ ID NO: 1584 - protein, 1008 aa, Chlamydomonas reinhardtii
MPHEFKTAVVWFRRDLRVDDNPALVAALAAAPNVIPVFIWAPEEEGQFQPGRCSRWWSKHSLVDLQQALAALGSRLVIRRSTDSTAALLQLVTELGAEAVFFNHLYDPISLMRDHDCKRGLTAAGVAHRTFNGDMLYEPWDVLDPNKQPYSTFDDFWNSVRAMPVPPPFPVSAPASMPAVPAAVPSMTVAEVDWFFTPEQEASSDQLKFKWKPGVGGAISELEHFLAERLTEFEHDRAKVDRDSTSRLSPWIHIGSISVRYIFYRVRQCQAEWLAAGTDRAQSCDDFLQQMGYREYSRYLAFHFPFIHERSLLGHLRACPWRIDQHAFKAWRQGQTGYPIVDAAMRQLWSSGWCHNRGRVVAASFLVKDLLLPWQWGLKHYWDAQIDADLECDALGWQYVSGGMSDAHPFSYMMDLEKEARRFDPDGEYVRRWLPALSRLPTEYIHAPWKAPASVLAAADVELGCNYPLPIITRSDAKANVDYACGVLEKSAVAPTGSESSGRYPYRAPTYPNAGGGGGASGGVDGAGSSGGNPTAAMGASGGAGPSSGTGTGGQGGAFRGRGDGGGSAPVSQQGGMLPPGVAVCVTAGTGGTQPDSRTVSGAHAGVSNSAGGVACDMPPPSHSHPRGGSSGVAAAGVGGVSGGPSSGGAAAPGATRKATAPGGAVFYHPGEASGEGHALLERILQQQRRQRGAANRQDGSGTNQPPPPVSMPGMLDAAGAAGGGGGGGGGLAGLPGVLQGLHGGAGATAAPAVAWAGRVAAGGVDDMDAVALWQQQQQLLQGGAAAFAFEQAMELLLARRRAGDGVSGFCGGDAPGRGGGDADEADGLMLEEDSEEVVSNTVDLHLSAFTGASCHRQSGTARGARAAERRLKKEAGSPEVTDGGGSAGAGCGEEDAMQCEDEEHGERGSPARRTADEEAQPPAEEGGAGSEDAGAAASEGDEAEGYGSESASEDNGGATPVEEADQMVVDGGGGGGGGGGGGGGRGGGQHKRRRSQLEGEQGDAAWE

SEQ ID NO: 1585 - protein, 635 aa, uncultured proteobacterium
MAKVIGIDLGTTNSCVSIMDGSQPRVIENAEGARTTPSIVAFTENERLVGQPAKRQAVTNPENTVFGVKRLVGRRYDDAHLKKDMKNLPFKVLNGGNGDAWVEAQGEQFSPSQISAFILQKMKETAESYLGEDVSQAVITVPAYFNDAQRQATKDAGKIAGLEVLRIINEPTAAALAYGLDKKESQIIAVYDLGGGTFDVTILEIDDGLFEVKSTNGDTFLGGEDFDMRIVNYLAEEFQKENGVDLTKDKMALQRLKEAAEKAKIELSSSSQTEINQPFISMDGASGQPLHLVVKLTRAKLESLVGDLIKASLKPCQAALKDAGLSTGDIDEIVLVGGMTRMPKVIEEVTKFFGKEPNKGVNPDEVVAMGAAIQAGVLQGDVKDVVLLDITPLSLGIETLGGVFTRLIDRNTTIPTKKSQVFSTAEDNQNAVTIRVFQGEREMAADNKILGQFNLESIPPAPRGMPQIEVTFDIDANGIVSVGATDKGTGKEQKITIQASGGLSDADIEAMVKDAEANADADKDRRELVEAKNQAESLIHSTEKAMDEHNNKVDPTTIEAIELAMAALRDDLETEDAGKIKAGIQNVTEAAMKLGEAIYKASQEAEANGDVDDGPVADDDILDADFEDLDGDKRS

SEQ ID NO: 1586 - protein, 556 aa, Zymobacter palmae
MYTVGMYLAERLAQIGLKHHFAVAGDYNLVLLDQLLLNKDMEQVYCCNELNCGFSAEGYARARGAAAAIVTFSVGAISAMNAIGGAYAENLPVILISGSPNTNDYGTGHILHHTIGTTDYNYQLEMVKHVTCARESIVSAEEAPAKIDHVIRTALRERKPAYLEIACNVAGAECVRPGPINSLLRELEVDQTSVTAAVDAAVEWLQDRQNVVMLVGSKLRAAAAEKQAVALADRLGCAVTIMAAEKGFFPEDHPNFRGLYWGEVSSEGAQELVENADAILCLAPVFNDYATVGWNSWPKGDNVMVMDTDRVTFAGQSFEGLSLSTFAAALAEKAPSRPATTQGTQAPVLGIEAAEPNAPLTNDEMTRQIQSLITSDTTLTAETGDSWFNASRMPIPGGARVELEMQWGHIGWSVPSAFGNAVGSPERRHIMMVGDGSFQLTAQEVAQMIRYEIPVIIFLINNRGYVIEIAIHDGPYNYIKNWNYAGLIDVFNDEDGHGLGLKASTGAELEGAIKKALDNRRGPTLIECNIAQDDCTETLIAWGKRVAATNSRKPQA

SEQ ID NO: 1587 - protein, 499 aa, Synechocystis sp.
MNSSLVILYHREPYDEVRENGKTVYREKKSPNGILPTLKSFFADAEQSTWVAWKQVSPKQKDDFQADMSIEGLGDRCTVRRVPLTAEQVKNFYHITSKEAFWPILHSFPWQFTYDSSDWDNFQHINRLFAEAACADADDNALFWVHDYNLWLAPLYIRQLKPNAKIAFFHHTPFPSVDIFNILPWREAIVESLLACDLCGFHIPRYVENFVAVARSLKPVEITRRVVVDQAFTPYGTALAEPELTTQLRYGDRLINLDAFPVGTNPANIRAIVAKESVQQKVAEIKQDLGGKRLIVSAGRVDYVKGTKEMLMCYERLLERRPELQGEISLVVPVAKAAEGMRIYRNAQNEIERLAGKINGRFAKLSWTPVMLFTSPLAYEELIALFCAADIAWITPLRDGLNLVAKEYVVAKNGEEGVLILSEFAGCAVELPDAVLTNPYASSRMDESIDQALAMDKDEQKKRMGRMYAAIKRYDVQQWANHLLREAYADVVLGEPPQM

SEQ ID NO: 1588 - protein, 432 aa, Bacillus anthracis
MGQIMKRSLTKECTEKSGKVVSLQGWVKKIRHLGNVSFLLLRDRTGVIQCVLENEFAGFKVDVESIVHVIGEIVETSKTELGVEVLAHEVKILNGAEPLPFEINKKKLQVGLDQLLNERVLSLRHERTTAIFKVKSTLVQSFSELLIENDFTRIFTPKIVSQGAEGGANVFKLPYFQKEAYLAQSPQFYKQMMVAGGLERVFEIAPVYRAEHHNSSRHLNEYISLDVELGFIHDFHEVMQLETDVLRYMFQQVAKNCEKELQLLQIEVPVITEIPKITLLEAQEILKSKYCKESPVGDLDTEGEKLLGKYVKETYKSEFVFITHYPKEARPMYTMPNNENSAITDSFDLLYKGLEITSGAQRIHNYEMLLDSFKEKGLHPDKFQSYLNTFRYGCPPHGGFGIGLERIVYKLLELSNVREASAFPERLYASYT

SEQ ID NO: 1589 - protein, 611 aa, Bacillus anthracis
MSKIIGIDLGTTNSCVAVMEGGEPKVIPNPEGNRTTPSVVAFKNEERQVGEVAKRQAITNPNTIMSVKRHMGTDYKVEVEGKDYTPQEISAIILQNLKASAEAYLGETVTKAVITVPAYFNDAERQATKDAGRIAGLEVERIINEPTAAALAYGLEKQDEEQKILVYDLGGGTFDVSILELADGTFEVISTAGDNRLGGDDFDQVIIDHLVAEFKKENNIDLSQDKMALQRLKDAAEKAKKDLSGVTQTQISLPFISAGAAGPLHLELTLTRAKFEELSAGLVERTLEPTRRALKDAGFAPSELDKVILVGGSTRIPAVQEAIKRETGKEPYKGVNPDEVVALGAAVQGGVLTGDVEGVLLLDVTPLSLGIETMGGVFTKLIERNTTIPTSKSQVFSTAADNQPAVDIHVLQGERPMSADNKTLGRFQLTDLPPAPRGIPQIEVTFDIDANGIVNVRAKDLGTSKEQAITIQSSSGLSDEEVERMVQEAEANADADQKRKEEVELRNEADQLVFQTDKVVKDLEGKVDAAEVAKATEAKEALQAAIEKNELEEIRAKKDALQEIVQQLTVKLYEQAQAAAGQAEGAEGAQDAGAKKDNVVDAEFEEVKEDK

SEQ ID NO: 1590 - protein, 419 aa, Bacillus anthracis
MFKFNDEKGQLKCSFCGKTQTQVRKLVAGPGVYICDECIELCTEIVQEELAKDEEVEFKDVPKPVEIREILDEYVIGQDNAKKALAVAVYNHYKRINSNSKIDDVELAKSNIALIGPTGSGKTLLAQTLARILNVPFAIADATSLTEAGYVGEDVENILLKLIQAADYDVEKAEKGIIYIDEIDKVARKSENPSITRDVSGEGVQQALLKILEGTVASVPPQGGRKHPHQEFIQIDTTNILFICGGAFDGIEPIIKRRLGEKVIGFGSEKKNADVNEKHVLSHVLPEDLLRFGLIPEFIGRLPVIANLEPLDEDALVDILTKPKNALVKQFQKLLELDDVELEFEEGALIEIAKKAIERKTGARGLRSIIEGLMLEVMFELPSRKDIEKCILTKETVADNAAPKLVLQDGTVLDTKTSA

SEQ ID NO: 1591 - protein, 585 aa, Bacillus anthracis
MRKTKIVCTIGPASESIEKLEQLIEAGMNVARLNFSHGSHEEHGARIKNIREASKKTGKTVGILLDTKGPEIRTHDFVDGQAELVTGAEVVLSTEQVLGTAEKFSVSYAGLYDDVDPGSRILIDDGLIELEVIEKADGNIRTKVLNSGTVKNKKGVNVPNVSIKLPGITEKDVKDIIFGIEQKVDFIAASFVRKAADVLEIRELLEEHNAQYIQIVPKIENQEGIDNIDSILEVSDGLMVARGDMGVEIPPEEVPLVQKRLIKKCNVLGKPVITATQMLDSMQRNPRPTRAEASDVANAIFDGTDAIMLSGETAAGQYPVEAVTMMANIAVRVEKSLQYEDMFKKRIKEFTPTITDAISQSVAHTALALDVAAIVAPTESGYTAKMISKYRPKSPIVAVTSDEQVGRRLALVWGVQAFMAEKRAASTDEMLDTAIQTGMDAGLIGLGDTVVITAGVPVAETGTTNLMKIHVVGEEVAKGQGIGRKAAKGKVVVAKTAAEAVANVNEGDILVTTSTDKDMIPAIEKAAALVVEEGGLTSHAAVVGVSIGIPVIVGVNGVTATLKNGQEVTVDAARGIVYNGHAEVL

SEQ ID NO: 1592 - protein, 302 aa, Saccharomyces cerevisiae
MNRFKQLEKLGNGTYATVYKGLNKTTGVYVALKEVKLDSEEGTPSTAIREISLMKELKHENIVRLYDVIHTENKLTLVFEFMDNDLKKYMDSRTVGNTPRGLELNLVKYFQWQLLQGLAFCHENKILHRDLKPQNLLINKRGQLKLGDFGLARAFGIPVNTFSSEVVTLWYRAPDVLMGSRTYSTSIDIWSCGCILAEMITGKPLFPGTNDEEQLKLIFDIMGTPNESLWPSVTKLPKYNPNIQQRPPRDLRQVLQPHTKEPLDGNLMDFLHGLLQLNPDMRLSAKQALHHPWFAEYYHHAS

SEQ ID NO: 1593 - protein, 499 aa, Ipomoea batatas
MAPIPGVMPIGNYVSLYVMLPLGVVNADNVFPDKEKVEDELKQVKAGGCDGVMVDVWWGIIEAKGPKQYDWSAYRELFQLVKKCGLKIQAIMSFHQCGGNVGDAVFIPIPQWILQIGDKNPDIFYTNRAGNRNQEYLSLGVDNQRLFQGRTALEMYRDFMESFRDNMADFLKAGDIVDIEVGCGAAGELRYPSYPETQGWVFPGIGEFQCYDKYMVADWKEAVKQAGNADWEMPGKGAGTYNDTPDKTEFFRPNGTYKTDMGKFFLTWYSNKLIIHGDQVLEEANKVFVGLRVNIAAKVSGIHWWYNHVSHAAELTAGFYNVAGRDGYRPIARMLARHHATLNFTCLEMRDSEQPAEAKSAPQELVQQVLSSGWKEYIDVAGENALPRYDATAYNQMLLNVRPNGVNLNGPPKLKMSGLTYLRLSDDLLQTDNFELFKKFVKKMHADLDPSPNAISPAVLERSNSAITIDELMEATKGSRPFPWYDVTDMPVDGSNPFD

SEQ ID NO: 1594 - protein, 647 aa, Pisum sativum
MRNDSPYTPLLNGSANNHRRDLLLVLSGLLLLASIIAFSGYRGGFINSREPHADVSSSSSSSASSDEAAKPSAVSRGVSSGVSEKSNTFLSGKVVGEAESFPWDNTMLSWQRTAFHFQPEKNWMNDPNGPLYYKGWYHFFYQYNPNGAVWGDIVWGHAVSRDIIHWLHLPLAMVADQWYDSNGVWTGSATILPDGQVIMLYTGSTNESVQVQNLAYPADLNDPLLVDWIKYPSNPVLVPPKGILPKDFRDPTTAWLTTEGKWRITIGSKINKTGVALVYDTVDFKTYERKDVLLNAVPGTGMWECVDFFPVSKKSENGSDTSINGVEVKHVMKVSLDDDRHDYYSLGTYDEKKVKFIADDFKNDVGVGLRYDYGIFYASKTFYDQKKNRRVLWGWIGESDSEYADVAKGWASVQSIPRIVKLDKKTGSNLLQWPVAEVESLRLKSDEFKNLKVKPGAVVSLDIETATQLDIDAEFEIDKEALEKTAQSNVEYECSTSGGASRRGALGPFGLYVLADKGLSEYTPVYFYVVKGSNGKLNTPFCSDQSRSSLANDVHKQIYGSVVPVLEGEKLSLRILVDHSIVESFAQGGRTCITSRVYPTRAIYGAARLFLFNHAIETNVTASLKVWANEFCIYTPIPPCSKGVRRN

SEQ ID NO: 1595 - protein, 222 aa, Pisum sativum
MRNDSPYTPLLNGSANNHRRDLLLVLSGLLLLASIIAFSGYRGGFINSREPHADVSSSSSSSASSDEAAKPSAVSRGVSSGVSEKSNTFLSGKVVGEAESFPWDNTMLSWQRTAFHFQPEKNWMNDPNGPLYYKGWYHFFYQYNPNGAVWGDIVWGHAVSRDIIHWLHLPLAMVADQWYDSNGVWTGSATILPDGQVIMLYTGSTNESVQVQNLAYPADLND

SEQ ID NO: 1596 - protein, 568 aa, Zymomonas mobilis
MSYTVGTYLAERLVQIGLKHHFAVAGDYNLVLLDNLLLNKNMEQVYCCNELNCGFSAEGYARAKGAAAAVVTYSVGALSAFDAIGGAYAENLPVILISGAPNNNDHAAGHVLHHALGKTDYHYQLEMAKNITAAAEAIYTPEEAPAKIDHVIKTALREKKPVYLEIACNIASMPCAAPGPASALFNDEASDEASLNAAVEETLKFIANRDKVAVLVGSKLRAAGAEEAAVKFADALGGAVATMAAAKSFFPEENPHYIGTSWGEVSYPGVEKTMKEADAVIALAPVFNDYSTTGWTDIPDPKKLVLAEPRSVVVNGVRFPSVHLKDYLTRLAQKVSKKTGALDFFKSLNAGELKKAAPADPSAPLVNAEIARQVEALLTPNTTVIAETGDSWFNAQRMKLPNGARVEYEMQWGHIGWSVPAAFGYAVGAPERRNILMVGDGSFQLTAQEVAQMVRLKLPVIIFLINNYGYTIEVMIHDGPYNNIKNWDYAGLMEVFNGNGGYDSGAGKGLKAKTGGELAEAIKVALANTDGPTLIECFIGREDCTEELVKWGKRVAAANSRKPVNKLL

SEQ ID NO: 1597 - protein, 228 aa, Pisum sativum
PVYISISCNLAGIPHPTFSREPVPFSLSPKSSNQMGLEAAVEAAAEFLNKAVKPVLVAGPKLRVAKASEAFTELADKSAYPYAVMPSAKGLVPENHQHFVGTFWGAVSTSFCAEIVESADAYLFAGPIFNDYSSVGYSLLLKKEKSIIVEPNRVVIGNGVAFGCILMKDFLSALAKRIKRNNTAYENYHRILVPEGVPVESEPREPLRVNVLFQHIQNMLSSKTAVIA

SEQ ID NO: 1598 - protein, 662 aa, Asparagus officinalis
MASSRDVESPPTSYAPLPSDDEQRPGSAPPRSRLRLIAIAMPPILLLALAAALFLSGSGAVTDLVAGPSPDTMPEIVRTDRGVEEGVSSKSSGAGPGLLTSVSHGQYPWTNKMLSWQRTGFHFQPEKNWMNDPNGPLYYKGWYHFFYQYNPNAAVWGDIAWGHAVSKDLLSWRHLPLAMVPDRWYDINGVWTGSATILPDGRIIMLYTGATNESVQVQNLAVPADLSDPLLLEWTKVDDANPILVPPPGVGATDFRDPTTAWFEPSDSTWRIAIGTKDADHSGVALVYSTKDFLNYTLLPGTLHTVKHVGMWECIDFYPIATSGAGANRGLDPSVRPSKLVKHVLKESSDDDRQDWYAIGTYDPDTNKWTPDDESLDVGIGLRYDLGKFYASKTFYDQEKKRRVLWGWIGESDSESADILKGWASLQGIPRTVLYDLRTGSNLITWPIEEVESLRSNLHDFSGITIDKGSTFHLDVHGAAQLDIEAEFKINEESLSAEAENGTGVMYNCSGGGGAAERGLLGPFGLLVLANSDLTEQTAAYFYVSRGVDGELQTHFCQDEMRSSKANDIVKSVVGGTVPVLKGETLSLRILVDHSIVESFAQGGRASATSRVYPTEAIYSSAKVFLFNNATGASITAQSLKIWHMNSTLSRPFDFNDGAQAQ

SEQ ID NO: 1599 - protein, 493 aa, Arabidopsis thaliana
MGETAAANNHRHHHHHGHQVFDVASHDFVPPQPAFKCFDDDGRLKRTGTVWTASAHIITAVIGSGVLSLAWAIAQLGWIAGPAVMLLFSLVTLYSSTLLSDCYRTGDAVSGKRNYTYMDAVRSILGGFKFKICGLIQYLNLFVIAIGYTIAASISMMAIKRSNCFHKSGGKDPCHMSSNPYMIVFGVAEILLSQVPDFDQIWWISIVAAVMSFTYSAIGLALGIVQVAANGVFKGSLTGISIGTVTQTQKIWRTFQALGDIAFAYSYSVVLIEIQDTVRSPPAESKTMKKATKISIAVTTIFYMLCGSMGYAAFGDAAPGNLLTGFGFYNPFWLLDIANAAIVVHLVGAYQVFAQPIFAFIEKSVAERYPDNDFLSKEFEIRIPGFKSPYKVNVFRMVYRSGFVVTTTVISMLMPFFNDVVGILGALGFWPLTVYFPVEMYIKQRKVEKWSTRWVCLQMLTVACLVISVVAGVGSIAGVMLDLKVYKPFKSTY

SEQ ID NO: 1600 - protein, 466 aa, Arabidopsis thaliana
  misc_feature (59)..(59): Xaa can be any naturally occurring amino acid
  misc_feature (220)..(220): Xaa can be any naturally occurring amino acid
  misc_feature (459)..(459): Xaa can be any naturally occurring amino acid
MDVPRPAFKCFDDDGRLKRSGTVWTASAHIITAVIGSGVLSLAWAIGQLGWIAGPTVMXLFSFVTYYSSTLLSDCYRTGDPVSGKRNYTYMDAVRSILGGFRFKICGLIQYLNLFGITVGYTIAASISMMAIKRSNCFHESGGKNPCHMSSNPYMIMFGVTEILLSQIKDFDQIWWLSIVAAIMSFTYSAIGLALGIIQVAANGVVKGSLTGISIGAVTXTQKIWRTFQALGDIAFAYSYSVVLIEIQDTVRSPPAESKTMKIATRISIAVTTTFYMLCGCMGYAAFGDKAPGNLLTGFGFYNPFWLLDVANAAIVIHLVGAYQVFAQPIFAFIEKQAAARFPDSDLVTKEYEIRIPGFRSPYKVNVFRAVYRSGFVVLTTVISMLMPFFNDVVGILGALGFWPLTVYFPVEMYIRQRKVERWSMKWVCLQMLSCGCLMITLVAGVGSIAGVMLDLKVXKPFKTTY

SEQ ID NO: 1601 - protein, 527 aa, Arabidopsis thaliana
MHSSHLLLEEPIRMTSILEPSKSSFFPALTKIVGTLGPKSRSVEVIAGCLKAGMSVARFDFSWCDADYHQETLENLKIAVKSTKKLCAVMLDTVGPELQVINKTEKAISLKADGLVTLTPSQDQEASSEVLPINFDGLAKAVKKGDTIFVGQYLFTGSETTSVWLEVEEVKGDDVICISRNAATLGGPLFTLHVSQVHIDMPTLTEKDKEVISTWGVQNKIDFLSLSYCRHAEDVRQARELLNSCGDLSQTQIFAKIENEEGLTHFDEILQEADGIILSRGNLGIDLPPEKVFLFQKAALYKCNMAGKPAVLTRVVDSMTDNLRPTRAEATDVANAVLDGSDAILLGAETLRGLYPVETISTVGRICCEAEKVFNQDLFFKKTVKYVGEPMTHLESIASSAVRAAIKVKASVIICFTSSGRAARLIAKYRPTMPVLSVVIPRLTTNQLKWSFSGAFEARQSLIVRGLFPMLADPRHPAESTSATNESVLKVALDHGEQAGVIKSHDRVVVCQKVGDASVVKIIELED

SEQ ID NO: 1602 - protein, 338 aa, Arabidopsis thaliana
MARIGSFLIILYLTYALTLCVCDDDESNYGGDKGNLFPGFYRSSCPRAEEIVRSVVAKAVARETRMAASLMRLHFHDCFVQGCDGSLLLDTSGSIVTEKNSNPNSRSARGFEVVDEIKAALENECPNTVSCADALTLAARDSSVLTGGPSWMVPLGRRDSTSASLSGSNNNIPAPNNTFNTIVTRFNNQGLDLTDVVALSGSHTIGFSRCTSFRQRLYNQSGNGSPDRTLEQSYAANLRQRCPRSGGDQNLSELDINSAGRFDNSYFKNLIENMGLLNSDEVLFSSNEQSRELVKKYAEDQEEFFEQFAESMIKMGNISPLTGSSGEIRKNCRKINNS

SEQ ID NO: 1603 - protein, 501 aa, Arabidopsis thaliana
MAALLLLFLFLFASSALSQDSLIGVNIGTEVTNMPSPTQVVALLKSQNINRVRLYDADRSMLLAFAHTGVQVIISVPNDQLLGISQSNATAANWVTRNVAAYYPATNITTIAVGSEVLTSLTNAASVLVSALKYIQAALVTANLDRQIKVSTPHSSTIILDSFPPSQAFFNKTWDPVIVPLLKFLQSTGSPLLLNVYPYFDYVQSNGVIPLDYALFQPLQANKEAVDANTLLHYTNVFDAIVDAAYFAMSYLNFTNIPIVVTESGWPSKGGPSEHDATVENANTYNSNLIQHVINKTGTPKHPGTAVTTYIYELYNEDTRPGPVSEKNWGLFYTNGTPVYTLRLAGAGAILANDTTNQTFCIAKEKVDRKMLQAALDWACGPGKVDCSALMQGESCYEPDDVVAHSTYAFNAYYQKMGKASGSCDFKGVATVTTTDPSRGTCVFPGSAKSNQTLGNNTSALAPSANSTTSGCIPKYYHHPHASFGDLTLLSLLLIIALVFL

SEQ ID NO: 1604 - protein, 476 aa, Arabidopsis thaliana
MVQNHQTVLAVDMPQTGGSKYLDDDGKNKRTGSVWTASAHIITAVIGSGVLSLAWATAQLGWLAGPVVMLLFSVVTYFTSSLLAACYRSGDPISGKRNYTYMDAVRSNLGGVKVTLCGIVQYLNIFGVAIGYTIASAISMMAIKRSNCFHKSGGKDPCHMNSNPYMIAFGLVQILFSQIPDFDQLWWLSILAAVMSFTYSSAGLALGIAQVVVNGKVKGSLTGISIGAVTETQKIWRTFQALGDIAFAYSYSIILIEIQDTVKSPPSEEKTMKKATLVSVSVTTMFYMLCGCMGYAAFGDLSPGNLLTGFGFYNPYWLLDIANAAIVIHLIGAYQVYCQPLFAFIEKQASIQFPDSEFIAKDIKIPIPGFKPLRLNVFRLIWRTVFVIITTVISMLLPFFNDVVGLLGALGFWPLTVYFPVEMYIAQKKIPRWSTRWVCLQVFSLGCLVVSIAAAAGSIAGVLLDLKSYKPFRSEY

SEQ ID NO: 1605 - protein, 762 aa, Arabidopsis thaliana
MDVSALLTSAGINIAICVVLVSLYSILRKQPANYCVYFGRLLSDGRVKRHDPRWYERFAPSPSWLVKAWETTEEEMLAAAGLDAVVFIRMVICIIRIFSIVAVVCLAFVLPVNYYGQKMEHKEVHLESLGVFTIENLNPRSRWLWVHCLSLYIISSAACALLYFEYKNIAKKRLAHISGSASKPSHFTVLIRAIPQSPDQSYSETVSKYFTNYYAPSYVSHLMVYRDGFIHRLMNETERMCQAIKHVSPDLSCNPSLKSCVLCGPAATNSFQIISNETDSVKGLELGELTLTTTEEERPVAFVFFKSRYDALVVSEVLQTPNPMLWVADLAPEPHDVHWRNLRIPYRQLWMRRIATLVGAIAFMFVFLFPVTFVQGLTQLPTLSKNFPFLKDLLNRRFMEQVITGYLPSVILVLFFYTVPPLMMYFSTLEGCVSRSQKKKSACLKILYFTIWNVFFVNILSGSVIRQFTVFNSVRDVPAQLAKLVPAQAGFFMTYCFTSGWAGLACEIMQPVGLIWNLIAKVIVKNKEESYETLRFPYHTEIPRLLLFGLLGFTNSVIAPLILPFLLIYFFFAYLIYKNQIINVYITKYESGGQYWPVFHNTTIFSLILSQVIALGFFGLKLSTVASGFTIPLILLTLLFSEYCRQRFAPIFQKYPAEILIAMDRADEMTGKMEEIHNNLKVAYSQIPTCSEESSKAGCTSPCSDQELPDSEELKPEKENLKADYIWEFQRSKSGLDLEVKSCPSASPIRNSPGFAEIYKRT

SEQ ID NO: 1606 - protein, 294 aa, Arabidopsis thaliana
  misc_feature (182)..(182): Xaa can be any naturally occurring amino acid
MAIPTETQHQEKEASDASAAAAQKRWTLSDFDIGKPLGRGKFGHVYLAREKRSNHVVALKVLFKSQLQQSQVEHQLRREVEIQSHLRHPNILRLYGYFYDQKRVYLILEYAARGELYKDLQKCKYFSERRAATYVASLARALIYCHGKHVIHRDIKPENLLIGAQGELKIADFGWSVHTFNXRRTMCGTLDYLPPEMVESVEHDASVDIWSLGILCYEFLYGVPPFEAMEHSDTYRRIVQVDLKFPPKPIISASAKDLISQMLVKESSQRLPLHKLLEHPWIVQNADPSGIYRV

SEQ ID NO: 1607 - protein, 162 aa, Arabidopsis thaliana
  misc_feature (121)..(121): Xaa can be any naturally occurring amino acid
MVRKQFQQAKTGIEALKSMDANNYLKKVGLGRDDMFFWKQVGKALLCTYTIFGMAWIYNETSPLGWWTLKPRPKEERELAHLYERREFPYPGDTEAMEDFVAKGGMIGTAIGPKGIVESEXEADNYQKEMEKKKFDKEAQKLWLRMRNEVITELQEKGHNLE

SEQ ID NO: 1608 - protein, 498 aa, Arabidopsis thaliana
MAMIEQRPKTKIVCTLGPASRSVPMVEKLLRAGMNVARFNFSHGSHEYHQETLDNLHQAMLNTGILCAVMLDTKGPEIRTGFLKDGKPIQLKQGQEITISTDYDLKGDENTICMSYKKLAVDVNPGMVILCADGTISLLVLSCDKENGTVRCRCENSAMLGERKNVNLPGVVVDLPTLTEKDKEDIMQWGVPNQIDMIALSFVRKGSDLVQVRKLLGKHAKNILLMSKVENQEGVANFDDILVNSDAFMIARGDLGMEIPIEKIFLAQKVMIYKCNIQGKPVVTATQMLESMIKSPRPTRAEATDVANAVLDGTDCVMLSGETAAGAYPELAVRTMAKICVEAESTLDYGDVFKRIMLYSPVPMSPLESLASSAVRTANSARATLIMVLTRGGSTARLVAKYRPGMPILSVVVPEIKTDFFDWSCSDESPARHSLIFRGLIPVLYAGSARASHDESTEEAIEFATQYGKEKELCKTGDSVVALLRVGNASVIKILTVK

SEQ ID NO: 1609 - protein, 363 aa, Arabidopsis thaliana
MSSDAARTPLLPTEKIDTMAQDFNLNSRTSSSRKRRLRRSRSAPRGDCMYNDDVKIDEPPPHPSKIPMFSDLNPNLRRVIMFLALYLTIGTLCFYLVRDQISGHKTSGVVDALYFCIVTMTTVGYGDLVPNSSASRLLACAFVFSGMVLVGHLLSRAADYLVEKQEALLVRAFHLRQSFGPTDILKELHTNKLRYKCYATCLVLVVLFIVGTIFLVMVEKMPVISAVYCVCSTVTTLGYGDKSFNSEAGRLFAVFWILTSSICLAQFFLYVAELNTENKQRALVKWVLTRRITNNDLEAADLDEDGVVGAAEFIVYKLKEMGKIDEKDISGIMDEFEQLDYDESGTLTTSDIVLAQTTSQIQR

SEQ ID NO: 1610 - protein, 224 aa, Arabidopsis thaliana
MATSMIQRLFKQGTKIVGVGLNYASHAKELGNALPKDPIVFLKPTSSYLENGGTIEIPHPLDSLHHEVELAVVIGQKARDVPERLAMNYIGGYALALDMTARELQVSAMASGLPCTLAKGQDTFTPISSVLPKAMVLDPNNLELWLKVDDETRQKGWTKDMIFKVPYLISYISSVMTLFKGDVILTGTPEGIGPVKIGQKITAGITGLSEVQFDVGRRLKPLLR

SEQ ID NO: 1611 - protein, 475 aa, Arabidopsis thaliana
MGGGFRVLHLVRPFLAFLPEVQSADRKIPFREKVIYTVISLFIFLVCSQLPLYGIHSTTGADPFYWMRVILASNRGTVMELGITPIVTSGLVMQLLAGSKIIEVDNNVREDRALLNGAQKLLGILIAIGEAVAYVLSGMYGPVGQLGFGNAILIILQLFFAGIIVICLDELLQKGYGLGSGISLFIATNICESIIWKAFSPTTINTGRGAEFEGAVIALFHMLITKSNKVAALRQAFYRQNLPNVTNLLATVLIFLIVIYFQGFRVVLPVRSKSARGQQGSYPIKLFYTSNMPIILQSALVSNLYFISQLLYRKFSGNFFVNLLGQWKESEYSGQSIPVSGLAYLITAPASFADMAAHPFHALFYIVFMLTACALFSKTWIEVSGSSARDVSKQLKEQQMVMPGHRESNLQKELNRYIPTAAAFGGVCIGALTVLADFMRAIGSGTGILLAVTIIYQYFETFEKEKASELGFFGF

SEQ ID NO: 1612 - protein, 475 aa, Arabidopsis thaliana
MGGGFRVLHLVRPFLAFLPEVQSADRKVPFREKVIYTVISLFIFLVCSQLPLYGIHSTTGADPFYWMRVILASNRGTVMELGITPIVTSGLVMQLLAGSKIIEVDNNVREDRALLNGAQKLLGILIAIGEAVAYVLSGMYGPVGQLGVGNAILIILQLFFAGIIVICLDELLQKGYGLGSGISLFIATNICESIIWKAFSPTTINTGRGAEFEGAVIALFHMLITKSNKVAALRQAFYRQNLPNVTNLLATVLIFLIVIYFQGFRVVLPVRSKNARGQQGSYPIKLFYTSNMPIILQSALVSNLYFISQLLYRKFSGNFFVNLLGQWKESEYSGQSIPVSGLAYLITAPASFSDMAAHPFHALFYIVFMLTACALFSKTWIEVSGSSARDVAKQLKEQQMVMPGHRESNLQKELNRYIPTAAAFGGVCIGALTVLADFMGAIGSGTGILLAVTIIYQYFETFEKEKASELGFFGF

SEQ ID NO: 1613 - protein, 640 aa, Cichorium intybus
MASSTTATTPLILRDETQICPQLAGSPVGRRLSMANVLSGILVFVLVICVLVAVIHDQSQQIMATNNHQGGDKPTSAATFTAPLLQVDLKRVPGKLESNADVEWQRSAYHFQPDKNFISDPDGPMYHMGWYHLFYQYNPESAIWGNITWGHSVSRDMINWFHLPFAMVPDHWYDIEGVMTGSATVLPNGQIIMLYTGNAYDLSQLQCLAYAVNSSDPLLLEWKKYEGNPILFPPPGVGYKDFRDPSTLWMGPDGEWRMVMGSKHNETIGCALVYRTTNFTHFELNEEVLHAVPHTGMWECVDLYPVSTTHTNGLDMKDNGPNVKYILKQSGDEDRHDWYAVGTFDPEKDKWYPDDPENDVGIGLRYDYGKFYASKTFYDQHQKRRVLWGYVGETDPPKSDLLKGWANILNIPRSVVLDTQTGTNLIQWPIEEVEKLRSTKYDEFKDVELRPGSLVPLEIGTATQLDISATFEIDQKKLQSTLEADVLFNCTTSEGSVGRGVLGPFGIVVLADANRSEQLPVYFYIAKDTDGTSKTYFCADESRSSTDKDVGKWVYGSSVPVLGGENYNMRLLVDHSIVEGFAQGGRTVVTSRVYPTKAIYGAAKIFLFNNATGISVKVSLKIWKMAEAQLDPFPLSGWSS

SEQ ID NO: 1614 - protein, 122 aa, Buchnera aphidicola
MSITKEQILEAVSEMSVMNVVELISAMEKKFGVSANMSVNTNNNSEKSTIEEKTEFDIFLKSIGPNKVSVIKSVRSATGLGLKEAKDLVESAPTVLKENMSKNDAESLKKTLEDAGAEIEIK

SEQ ID NO: 1615 - protein, 413 aa, Chlorobium tepidum
MKRVVVTGIGVLSPIGLSAGAFWNALMEGKSGAAPITYFDTTNFATTFACELKNFKADEYIDRKSADRMDPYCQYGVISAEQALKDSGLDLTAIDPTRIGVVHGSGIGGMTVYDQQFRQYLERGPRRVSPFFIPMLIPDIAAGQISIRNGLMGPNYATASACATSLHAIMDAVMLLQMGMADYMVCGGSEAPITQMSVAGFNSAKALSTRNDAPTKASRPYDVDRDGFVMGEGAGSLVIETYESAVKRGAKIYAEIVGMGASADAYHLTAPHPEGLGACSAMTTALNMAGITPDKIDYINTHGTATPLGDLAEIKAIKKVFGEHASKLSISSTKSMTGHLLGAAGVVESIACILALQNQTVPPTINLDNVDPEIDVDVTPNVPKQRSIEYALNNGFGFGGHNGCLIFRKAPAA

SEQ ID NO: 1616 - protein, 638 aa, Buchnera aphidicola
MGKIIGIDLGTTNSCVAIMDGNKPRVLENSEGDRTTPSIIAYTEKGEVLVGQPAKRQAITNPKNTLFAIKRLIGRKFRDDEVQRDIKIMPYSIINSENGDAWIDVKKQKMAPPQISAEVLKKMKKTAEDYLGESIKEAVITVPAYFNDAQRQATKDAGRIAGLEVKRIINEPTAAALAYGLDKGEGNRTIAVYDLGGGTFDISIIEIDDVDKEKTFEVLATNGDTHLGGEDFDSRLINYLVQEFKKEQGIDLRNDSLAMQRLKEAAEKAKIELSSAQQTDVNLPYITADSNGPKHLNIKVTRSKLESLVEDLVMRSIEPLKVALKDAGLSVGDINDVILVGGQTRMPMVQSKVADFFGKEPRKDVNPDEAVAVGAAVQGGVLSGDVKDVLLLDVTPLSLGIETMGGIMTSLINKNTTIPTKHSQVFSTAEDNQSAVTIHILQGERKRALDNKSLGQFNLDGIEPAPRGTAQIEVTFDIDSDGILHVSAKDKKTGKEQKITIKASSGLNEEEIKKMINDAEANSEADRKFEELIQVRNQGDQLIHSIRKQLDENKNQIEKKELEKIKSALDELERSLKGENKSEIEKNIQNLLNISSKLTEINQKKSEENLKKEDTSSESKKDENVVDAEFEEIKDPKK

SEQ ID NO: 1617 - protein, 427 aa, Buchnera aphidicola
MTDKSKDNSKKLLQCSFCGKNQKEVKKLIAGPAVYICDECIRLCNNIIQETKTTKKIEDDELSYLPTPHEIKKHLDNYVIGQNHTKKVLSVAVYNHYQRIRNVSKNKDNVELGKSNILLIGPTGSGKTLLAETLAKLLNVPFSIADATTLTEAGYVGEDVENVIQKLLQKCEYNVKKAELGIVYIDEIDKISRKSDNPSITRDVSGEGVQQALLKLIEGTLASIPPQGGRKHPQQEFLQVNTANILFICAGAFSELSKIISKRIDTGNTIGFNCNLKKQKKKKSEQYFLQQVQSKDLIKFGLIPEFIGRLPIITILKELNETALVQILCKPKNALIKQYQTLFNLEKVKLEFTKEAVTSIAKKALSKKTGARGLRSIIENILLDIMYELPSMKNVEKILIDESVVNSHSLPKIIYEEKNKSKKASGE

SEQ ID NO: 1618 - protein, 126 aa, Chlorobium tepidum
MSSIETLVEEIGKLTLTEASELVKALEEKFGVSAAPAVMAGAVMAAPAGEAAAAEEKTEFDVVLKSAGANKINVIKVVRAITGLGLKEAKDMVDGAPKTVKEAVSKDEAEKIAKELKDAGAEVELN

SEQ ID NO: 1619 - protein, 681 aa, Arabidopsis thaliana
MSGSVSGCGSGGCSIVWFRRDLRVEDNPALAAAVRAGPVIALFVWAPEEEGHYHPGRVSRWWLKNSLAQLDSSLRSLGTCLITKRSTDSVASLLDVVKSTGASQIFFNHLYDPLSLVRDHRAKDVLTAQGIAVRSFNADLLYEPWEVTDELGRPFSMFAAFWERCLSMPYDPESPLLPPKKIISGDVSKCVADPLVFEDDSEKGSNALLARAWSPGWSNGDKALTTFINGPLLEYSKNRRKADSATTSFLSPHLHFGEVSVRKVFHLVRIKQVAWANEGNEAGEESVNLFLKSIGLREYSRYISFNHPYSHERPLLGHLKFFPWAVDENYFKAWRQGRTGYPLVDAGMRELWATGWLHDRIRVVVSSFFVKVLQLPWRWGMKYFWDTLLDADLESDALGWQYITGTLPDSREFDRIDNPQFEGYKFDPNGEYVRRWLPELSRLPTDWIHHPWNAPESVLQAAGIELGSNYPLPIVGLDEAKARLHEALSQMWQLEAASRAAIENGSEEGLGDSAEVEEAPIEFPRDITMEETEPTRLNPNRRYEDQMVPSITSSLIRPEEDEESSLNLRNSVGDSRAEVPRNMVNTNQAQQRRAEPASNQVTAMIPEFNIRIVAESTEDSTAESSSSGRRERSGGIVPEWSPGYSEQFPSEENGIGGGSTTSSYLQNHHEILNWRRLSQTG

SEQ ID NO: 1620 - protein, 473 aa, Arabidopsis thaliana
MQALQSSSLRASPPNPLRLPSNRQSHQLITNARPLRRQQRSFISASASTVSAPKRETDPKKRVVITGMGLVSVFGNDVDAYYEKLLSGESGISLIDRFDASKFPTRFGGQIRGFSSEGYIDGKNERRLDDCLKYCIVAGKKALESANLGGDKLNTIDKRKAGVLVGTGMGGLTVFSEGVQNLIEKGHRRISPFFIPYAITNMGSALLAIDLGLMGPNYSISTACATSNYCFYAAANHIRRGEADMMIAGGTEAAIIPIGLGGFVACRALSQRNDDPQTASRPWDKARDGFVMGEGAGVLVMESLEHAMKRGAPIVAEYLGGAVNCDAHHMTDPRADGLGVSSCIERCLEDAGVSPEEVNYINAHATSTLAGDLAEINAIKKVFKSTSGIKINATKSMIGHCLGAAGGLEAIATVKAINTGWLHPSINQFNPEQAVDFDTVPNEKKQHEVDVAISNSFGFGGHNSVVAFSAFKP

SEQ ID NO: 1621 - protein, 442 aa, Oryza sativa
MADTASPAAAREAMIEPASTPLLRRRGSYTRSMSHARDELGSFRSCLRWMCVEHSDGSSAVASWLVFTLLAVAVPAAARAALPRRAYDGQVQASLTLSAALAYLTLSRLVRRRGLRRLLYLDRLRHDSQDVRAGYTVELAGSFRLLACFVLPCFLADAAYKVYWYCANRPFPLWWSAAACALEMASWMYRTAMFFMACVLFRIICFLQILRMTGFARDFGQCADVADVLRQHRRIREQLRRISHRYRKFIVSCLLLVTASQFSALLAATRPHAQVNIATSGELALCSLSLVTGLLICLHSAAKITHKTQAITSVAAQWHADATINSQERDHENPRTPIKASSYLHAAGPVVPQPAPNASSSGDESEDETSPSDDGLDGTKIVSFHATHISFQKRQALVTYLENNRAGITVFGFVVDRTWLHALFMIEFSLVMWLLGKTIGIS

SEQ ID NO: 1622 - protein, 775 aa, Oryza sativa
MGGERPPPISGGGAFAFISKGWREVRDSASADLRQMRARADRELEHLLASASALAGPPLPPVAAGAPIAEVEFVRKRIQPKIMELRRQYSSTVRDAGWAPKAAGASLRVDLSGITAIRNAIVAEGGGGGGGGGRWGLVRWKGHADDEGRKEWEVVRMIRSGLKEFERRSLSSEVFGGFRGRGEFVEKFKLSLKSLNKESQESKEVLPLDLTEILAYLVRQSGPFLDQLGIRRDLCDKIVETLYSKHNGRLIYHSLSADRSLIGNENMTDELDLRIARVLESTGHHTEESFWKDHAKYKLSDNRRHVAIVTTASLPWMTGTAINPLFRAAYLARSTKQKVTLVVPWLCKSDQELVYPNNITFSSPEEQENYIRNWLQERLGFEANFKISFYPGKFSKERRSIIPAGDTSQFISSSEADIAILEEPEHLNWYHHGKRWTDKFKHVIGVVHTNYLEYIKREKNGALQAFLVKHINNWVTRAYCHKVLRLSAATQDLPRSVVCNVHGVNPKFLKVGEKIAADKEHGQQSFTKGAYFLGKMVWAKGYRELIDLLSKHKSDLEGFNVDVYGNGEDSQAVQMAARKLNLSLNFFKGRDHADSSLHGYKVFINPSVSDVLCTATAEALAMGKFVICADHPSNEFFKSFPNCLTYKTSEEFVARVKEAMASEPSPLTPEQRYSLSWEAATERFMEYSELDKVLNNKIGYSGQDGKRSKVRKIPLLPRLSEVVDGGLAFAHHCLTGNEILRLATGAIPGTRDYDKQQCMDLNLLPPQVQHPVYGW

SEQ ID NO: 1623 - protein, 492 aa, Oryza sativa
MVPREQAEEAIVADSNGKEEEVGVMGVSAGEHGADDHHGGGGKFSMKNLLWHGGSVWDAWFSCASNQVAQVLLTLPYSFSQLGMLSGVLLQLFYGFMGSWTAYLISVLYVEYRSRKEKEGVSFKNHVIQWFEVLDGLLGPYWKAAGLAFNCTFLLFGSVIQLIACASNIYYINDRLDKRTWTYIFGACCATTVFIPSFHNYRIWSFLGLGMTTYTAWYLAIAALLNGQAEGITHTGPTKLVLYFTGATNILYTFGGHAVTVEIMHAMWKPAKFKYIYLLATLYVFTLTLPSASAMYWAFGDELLTHSNAFSLLPKTGWRDAAVILMLIHQFITFGFACTPLYFVWEKVIGMHDTKSICLRALARLPIVVPIWFLAIIFPFFGPINSAVGALLVSFTVYIIPALAHILTYRTASARMNAAEKPPFFLPSWTGMFVLNMFIVVWVLVVGFGLGGWASMVNFIRQIDTFGLFAKCYQCPKPAPALAQSPVPLPHH

SEQ ID NO: 1624 - protein, 663 aa, Lagenaria siceraria
MAITSLYLTLLHSIHSPFLLLCLFLTYFFICLPYPFFPRSLSFLFYCRYFPPHHSGPFLLCSLFPLSLFFLLLLVSLLTLVSYHTPSPDATNLPENTQSPPPFRLARGVAEGVSAKSNPYFSDSVDSFNWTNAMFSWQRTFFHFQPEGNWMNDPNGPLYHKGWYHLFYQYNPESAVWGNISWGHAVSRDLITLAYISAYAMVPDQPYDVNGVWTGSATILPDGRIIMLYTGDTIDGVQVQNLAYPANLSDPLLLNWVKYPGNPVLVPPPGIGPKDFRDPTTAWLGHDGKWRITIGSRVGTTLGVSLVYTTNDFIKYELVDRFLHAVPGTGMWECVDFYPVSVHGSKGLDTSVNGHGVKHVLKASLDDTKMDHYAIGTYFSNNDTWVPDNPEEDVGIGLKLDYGRYYASKTFYDQNKERRILWGWINETDTEANDLAKGWASVQTIPRTVLFDHKTGSNIIQWPVEEVESLRLGSTEFNDVLVEPGSVVELEVGTATQLDILTEFELEALGSEKATISEEGCGGGAAERSSLGPFGLLVLAHQSLSELTPIYFNVANSSKGSREAYFCADEKRSSKAPDVFKQVYGSKIPVLEGENFSMRVLVDHSIVESFGQGGRRVITSRIYPTEAIYGAAKLFLFNNATSANVKATVKVWRLNSAFIQPFS

SEQ ID NO: 1625 - protein, 653 aa, Aegilops tauschii
MRRWLLRPLALLTTTTALLLNTSTSTSSSISTAHDLPALLSFKSLITKDPLGALSSWTINSSSNGSTHGFCSWTGVKCSRTHPGHVMALRLQGIGLSGTISPFLGNLSRLRVLDLSNNKLEGQIPPSLGNCFALRRLNLSFNSLSSAIPPAMGNLSKLVVLSIRKNNISGTIPPSFADLATVTVFSIASNYVHGQIPPWLGNLTALKDLNVEDNMMSGHVPPALSKLTNLRFLFLGTNNLQGLIPPVLFNMSSLERFDFESNQLSGSLPQDIGSTLPNLKEFSLFYNKFKGQIPSSLSNISSLERIVLHGNRFHGRIPSNIGQNGCLTVFVLGKNELQATESRDWDFLTSLANCSSLSTVDLQLNNLSGILPNSISNLSQKLETLQVGGNQIAGHIPTGIGRYYKLTVLEFADNLFTGTIPSDIGKLSNLRNLFLFQNRYHGEIPLSLGNMSQLNKLILSNNNLEGSIPATFGNLTELISLDLSSNLLSGQIPEEVMSISSLAVFLNLSNNLLDGPITPHVGQLVNLAIMDLSSNKLSSAIPNTLGSCIELQFLYLQGNLLHGQIPKEFMALRGLEELDLSNNNLSGPVPEFLESFQLLKNLNLSFNQLSGPVPDTGIFSNASIVSLTSNGMLCGGPVFFHFPACPYLAPDKL

SEQ ID NO: 1626 - protein, 499 aa, Ipomoea batatas
MAPIPGVMPIGNYVSLYVMLPLGVVNADNVFPDKEKVEDELKQVKAGGCDGVMVDVWWGIIEAKGPKQYDWSAYRELFQLVKKCGLKIQAIMSFHQCGGNVGDAVFIPIPQWILQIGDKNPDIFYTNRAGNRNQEYLSLGVDNQRLFQGRTALEMYRDFMESFRDNMADFLKAGDIVDIEVGCGAAGELRYPSYPETQGWVFPGIGEFQCYDKYMVADWKEAVKQAGNADWEMPGKGTGTYNDTPDKTEFFRPNGTYKTDMGKFFLTWYSNKLIIHGDQVLEEANKVFVGLRVNIAAKVSGIHWWYNHVSHAAELTAGFYNVAGRDGYRPIARMLARHHATLNFTCLEMRDSEQPAEAKSAPQELVQQVLSSGWKEYIDVAGENALPRYDATAYNQILLNVRPNGVNLNGPPKLKMSGLTYLRLSDDLLQTDNFELFKKFVKKMHADLDPSPNAISPAVLERSNSAITIDELMEATKGSRPFPWYDVTDMPVDGSNPFD

SEQ ID NO: 1627 - protein, 499 aa, Ipomoea batatas
MAPIPGVMPIGNYVSLYVMLPLGVVNADNVFPDKEKVEDELKQVKAGGCDGVMVDVWWGIIEAKGPKQYDWSAYRELFQLVKKCGLKIQAIMSFHQCGGNVGDAVFIPIPQWILQIGDKNPDIFYTNRAGNRNQEYLSLGVDNQRLFQGRTALEMYRDFMESFRDNMADFLKAGDIVDIEVGCGAAGELRYPSYPETQGWVFPGIGEFQCYDKYMVADWKEAVKQAGNADWEMPGKGAGTYNDTPDKTEFFRPNGTLQDGYGQVFLTWYSNKLIIHGDQVLEEANKVFVGLRVNIAAKVSGIHWWYNHVSHAAELTAGFYNVAGRDGYRPIARMLARHHATLNFTCLEMRDSEQPAEAKSAPQELVQQVLSRQVKEYIDVAGENALPRYDATAYNQMLLKLRPNGVNLNGPPKLKMSGLTYLRLSDDLLQTDNFELFKKFVKKMHADLDPSPNAISPAVLERSNSAITIDELMEATKGSRPFPWYDVTDMPVDGSNPFD

SEQ ID NO: 1628 - protein, 464 aa, Rhizobium sp.
MSRLVIVSNRVPVPDKGGIAPAGGLAVALKVALEEQGGGIWMGWSGKSSGEDEPAPLAQLQQGNITYALTDLTDTDVEEYYHGFANRVLWPICHYRLDLAEYGRKEMAGYFRVNRFFAHRLAPLVKPDDVIWVHDYPLIPLAAELRQMGLENRIGFFLHIPWPPADVLFTMPVHEEIMRGLSHYDVVGFQTDHDLENFASCLRREGIGDALGGGRLSAYGRIFKGGVYAIGIETAAFAEFAKKASTNSTVKKARESIERRSLIIGVDRLDYSKGLTQRIEAFERFILANPAQRGRVTYLQITPKSRSEVPEYEAMQRTVAEQAGRVNGALGAVDWVPMRYINRSVGRRVLAGLYRLGKVGLVTPLRDGKNLVAKEYVAAQDPDDPGVLVLSRFAGAARELQGALLVNPYDIEGTANAMARSLSMPLEERQERWTTMMDQLLEHDVSRWCRDFLNDLTASSDRCG

SEQ ID NO: 1629 - protein, 500 aa, Streptococcus pyogenes
MNKRVKIVATLGPAVEIRGGKKYGEDGYWAGQLDVEESAKKIAELIEAGANVFRFNFSHGDHKEQGDRMATVRLAEEIARQKVGFLLDTKGPEMRTELFADDAKEFSYVTGEKIRVATTQGIQSTRDVIALNVAGSLDIYDEVEVGHTILIDDGKLGLKVIDKDIATRQFIVEVENDGIIAKQKGVNIPNTKIPFPALAERDNADIRFGLEQGLNFIAISFVRTAKDVEEVREICRETGNDHVQLFAKIENQQGIDNLDEIIEAADGIMIARGDMGIEVPFEMVPVFQKMIITKVNAAGKAVITATNMLETMTEKPRATRSEVSDVFNAVIDGTDATMLSGESANGKYPVESVRTMATIDRNAQTLLNEYGRLDSSAFPRTNKTDVIASAVKDATHSMDIKLVVTITETGNTARAISKFRPDADILAVTFDEKVQRALMINWAVIPVLAEKPASTDDMFEVAERVAVEAGLVQSGDNIVIVAGVPVGTGGTNTMRVRTVK

SEQ ID NO: 1630 - protein, 307 aa, Petunia x
MDQYEKVEKIGEGTYGVVYKARDRVTNETIALKKIRLEQEDEGVPSTAIREISLLKEMQHANIVRLQDVVHTVKSDCILSFEYLDLDLKKHMDSSPEFSKDPRLVKMFLYQILRGIAYCHSHRVLHRVLHRDLKPQNLLIGRRTNALKLADFGLARAFGIPVRTFTHEVVTLWYRAPEILLGSRHYSTPVDVWSVGCIFAEMVTQRPLFPGDSEIDELFKIFRVMGTPNEDTWPGVTTLPDFKSALPKWPSKDLATIVPNLDGAGLDLLDKTVRLDPSKRITARNALEHEYFKDIGYVFRSKGSSRV

SEQ ID NO: 1631 - protein, 573 aa, Streptococcus pyogenes
MQEANIQDICRVGHLGLVGEIIEMRRDQASIQVYEETSGIGPGEPVVTTGCPLSVELGPGLISEMFDGIQRPLDRFQKATDSDFLIRGVAIPSLDRKAKWAFIPKLSVGQEVVAGDILGTVQETAVIEHRIMVPYKVSGTLVAIHAGDFTVTDTVYEIKQEDGSIYQGSLMQTWPVRQSRPVAQKLIPVEPLVTGQRVIDTFFPVTKGGAAAVPGPFGAGKTVVQHQIAKFANVDIVIYVGCGERGNEMTDVLNEFPELIDPNTGQSIMERTVLIANTSNMPVAAREASIYTGITIAEYFRDMGYSVAIMADSTSRWAEALREMSGRLQEMPGDEGYPAYLGSRIAEYYERAGRVRTLGSQEREGTITAIGAVSPPGGDISEPVTQNTLRIIKVFWGLDAPLAQRRHFPAINWLTSYSLYQDDVGSYIDRKQESNWSNKVTRAMAILQREASLEEIVRLVGLDSLSEQDRLTMAVARQIREDYLQQNAFDSVDTFTSFPKQEAMLTNILTFNEEASKALSLGAYFNEIMEGTAQVRDRIARSKFIPEENLEQIKGLTQKVTKEIHHVLAKGGI

SEQ ID NO: 1632 - protein, 354 aa, Arabidopsis thaliana
YTTMYLQKQQRYATSVAASAARTKGPVVSNGSGFPDHNMTTSPAGTTKFANANSGFPQNLVQSSSNQVQSQQWKNNSPRTTNTTQAQSPSMLSPSTSVAAASSLRNIPHKQQSRPQQSQISFAANSKPMTSGSPMQQVQGGTNHQAPSPPMLVGSPSTSSVSKNASGSPRTTASASSAANKGGQASTTTHSASQPSKNLQPASAASSAGGRNNGPSVLGNPTTSSGSKSQQQQQLPKHGLQPQAQLFFSNPYMQAQHQHQQQQITISPSGGYYIQRHQQQSGSAPAVPVTGAVTATSDPAKAIAAASAANNMKGGGGMGKTQQHQLGPPGFTNVHAVSSAVQVKPVDQKQQAGE

SEQ ID NO: 1633 - protein, 1129 aa, Mesotaenium caldariorum
MESSTGLVAGSRNRNQFVVIPADEEQRRNVTTPAASVCQICGDDVGLSATGELFVACVECGYPVCRPCYEYERKEGSKACPQCKTVYKRLKGSPRVPTDEEDDDIEDLENEFRGHSHVAHKSHDQHDHDHLDDVESVRSGRNTHDPYATYEPYRVQPQVPLLTDAHYETGSEYGGHTTNSDYGGHGVGSDYGGKTNPSEYSHHHHSHHQAIMVPGGQPGSDAGVHAGSFVNGDGISAKSADPKDPASFGYGSIAWKDRVDAWKQRQDKMQMTTAPGGVLVDANKGGPGGPEDPYNGGNDLPLMDESRQPLSRKVDFNMGLIQPYRLMIVIRLVVLAFFLRYRILNPAPSRPLWMTSVICEIWFAVSWILDQFPKWMPINRETYLDRLNLRFEKEGEPSQLQAVDLFVSTVDPEKEPPLTTANTLLSILSIDYPVDKVSCYLSDDGAAMLTFEALSETSEFARRWVPFVKKYNIEPRAPEMYFSQKIDYLKDKIQPSFVKERRIMKREYEEFKVRINALVSKSMKVPEDGWTMQDGTPWPGNNSRDHPGMIQVFLGPSGGLDTDGNALPRLVYVSREKRPGFNHHKKAGAMNALIRVSAVLTNAPYILNLDCDHYVNNSKALRHAMCFMMDPNVGKKVCYVQFPQRFDGIDRSDRYANHNTVFFDINLRGLDGLQGPVYVGTGCCFRRHALYGYEPKKKESSRGCCSMVFCGCCGLCGRKKEKSAVDNPLKTGKFKGSDPSLPMYNIDDLEDGDGQERESLVALKQFEKRFGQSPVFVLSTFHEEGGSVASSSASSTLKEAIHVISCGYEDKTEWGKEVGWIYGSVTEDILTGFKMHCRGWRSIYCMPKIAAFKGSAPINLSDRLQQVLRWALGSVEIFLSRHCPIWYGWSGSRLKLLQRLAYINTVVYPFTAFPLLAYCTLPAICLLTNQFIIPEISSLNSLWFIALFISIFACAFLEMRWSGVGMEEWWRNEQFWVIGGVSSHLYAVFQGLLKVLAGIDTNFTVTAKAADDGEAYADLYLFKWTSLLIPPTTLIIINLIGAVAGVANAINNGYDQWGPLFGKLFFAFWVVVHLYPFLKGLMGKSNRTPTLIIVWSVLLASIFSLLWVKINPFTNTTNGPALVQCGIRC

SEQ ID NO: 1634 - protein, 239 aa, Mesotaenium caldariorum
DQFPKWNPINRETNLGRLQLRYGDALDAVDLFVSTVDPGKEPPLTTANTLLSILAMDYPVEKLNCYLSDDGASKLTFDAVNETSGFAKKWVPFCKKFAVEPRAPEAYFAQKADFLKGQVQSSFVNERRNMKKEYEEFKVRINHLVSDFQNVPEDGWTMADGSYWPGNNARDHPGMIQVFLGPSGGKDVEGNALPRLVYVSREKRPGFNHHKKAGAMNALIRVSALLTNAPHILILDCDH

SEQ ID NO: 1635 - protein, 122 aa, Yersinia pestis
MSTITKDQILEGVAALSVMEIVELISAMEEKFGVSAAAVAAGPAAAVEAAEEQTEFDVVLASFGENKVAVIKAVRGATGLGLKEAKDLVESAPAVLKEGVNKDEAETLKKSLEEAGASVEIK

SEQ ID NO: 1636 - protein, 372 aa, Yersinia pestis
MELPMNQSYLWATLLTLAVLCINKSIFNRRFRDCVMKTLGEFIVEKQLDFSHATGELTALLSAIKLGAKIIHRDINKAGLVDILGASGVSNIQGEDQMKLDLFANEKLKAALKARGEVAGIASEEEDDIVIFDGGRAENAKYVVLMDPLDGSSNIDVNVSVGTIFSIYRRITPFGTPITEEDFLQPGTKQVTAGYVVYGSSTMLVYTTGYGVHAFTYDPSLGVFCLSHEKVRYPATGCMYSINEGNYIKFPLGVKKYIKYCQEQDEATKRPYTSRYIGSLVADFHRNLLKGGIYIYPSTASHPQGKLRLLYECNPMAFLAEQAGGKATDGVNRILDIVPEKLHQRAPFFVGTKSMVEDAEGFIAKFPDEEAK

SEQ ID NO: 1637 - protein, 423 aa, Yersinia pestis
MTDKRKDGSGKLLYCSFCGKSQHEVRKLIAGPSVYICDECVDLCNDIIREEIKEVSPHRDRSSLPTPHEIRHHLDDYVIGQEPAKKVLAVAVYNHYKRLRNGDTSNGIELGKSNILLIGPTGSGKTLLAETLARLLDVPFTMADATTLTEAGYVGEDVENIIQKLLQKCDYDVQKAQRGIVYIDEIDKISRKSDNPSITRDVSGEGVQQALLKLIEGTIAAVPPQGGRKHPQQEFLQVDTSKILFICGGAFAGLDKVIGQRINTGSGIGFGAVVKGQSEKATEGELLSQVEPEDLIKFGLIPEFIGRLPVVATLSELSEDALIQILKEPKNALTKQYQALFSLEGVELEFRDEALTAIAKKAMARKTGARGLRSIVEGALLDTMYDLPSMDSVEKVVVDESVIAGQSAPMLIYGQPEAQASGE

SEQ ID NO: 1638 - protein, 636 aa, Yersinia pestis
MGKIIGIDLGTTNSCVAIMDGTKARVLENSEGDRTTPSIIAYTQDGETLVGQPAKRQAVTNPQNTLFAIKRLIGRRFQDEEAQRDKDIMPYKIIAADNGDAWLEVKGQKMAPPQISAEVLKKMKKTAEDYLGEPVTEAVITVPAYFNDAQRQATKDAGRIAGLEVKRIINEPTAAALAYGLDKEVGNRTIAVYDLGGGTFDISIIEIDEVDGEKTFEVLATNGDTHLGGEDFDSRLINYLVEEFKKDQGMDLRTDPLAMQRLKEAAEKAKIELSSAQQTDVNLPYITADGSGPKHMNIKVTRAKLESLVEDLVNRSIEPLKVALQDAGLSVSDIQDVILVGGQTRMPMVQKKVADFFGKEPRKDVNPDEAVAIGAAVQGGVLSGEVKDVLLLDVTPLSLGIETMGGVMTPLITKNTTIPTKHSQVFSTAEDNQSAVTIHVLQGERKRAQDNKSLGQFNLDGIQPAPRGMAQIEVTFDIDADGILHVSAKDKNTGREQKITIKASSGLNEEEIQKMVRDAEANAEADRKFEELVQTRNQADHLIHGTRKQLEEAGDKLPAEDKTAIEEAMKGLEAALKGEDKAEIEAKTQALVQVSGKLLEMAQQQQAAAGGDAGDTSAKKEDDVVDAEFEEVKDKK

SEQ ID NO: 1639 - protein, 496 aa, Glycine max; identical to SEQ ID NO: 509

SEQ ID NO: 1640 - protein, 209 aa, Coffea arabica
DQYEKVEKIGEGTYGVVYKARDRLTNEMIALKKIRLEQEDEGVPSTAIREISLLKEMQHNNIVRLQDVVHSEKRIYLVFEYLDLDLKKHMDSCPELAKDPCLIKTFLYQILHGIAYCHSHRVLHRDLKPQNLLIDRRTNALKLADFGLARAFGIPVRTFTHEVVTLWYRAPEILLGSRHYSTPVDIWSVGCIFAEMVNQRPLFPVDSEI

SEQ ID NO: 1641 - protein, 483 aa, Arabidopsis thaliana
MENGEKAAETVVVGNYVEMEKDGKALDIKSKLSDMFWHGGSAYDAWFSCASNQVAQVLLTLPYSFSQLGMLSGILFQLFYGILGSWTAYLISILYVEYRTRKEREKVNFRNHVIQWFEVLDGLLGKHWRNVGLAFNCTFLLFGSVIQLIACASNIYYINDNLDKRTWTYIFGACCATTVFIPSFHNYRIWSFLGLLMTTYTAWYLTIASILHGQVEGVKHSGPSKLVLYFTGATNILYTFGGHAVTVEIMHAMWKPQKFKSIYLFATLYVLTLTLPSASAVYWAFGDLLLNHSNAFALLPKNLYRDFAVVLMLIHQFITFGFACTPLYFVWEKLIGMHECRSMCKRAAARLPVVIPIWFLAIIFPFFGPINSTVGSLLVSFTVYIIPALAHIFTFRSSAARENAVEQPPRFLGRWTGAFTINAFIVVWVFIVGFGFGGWASMINFVHQIDTFGLFTKCYQCPPPVMVSPPPISHPHFNHTHGL

SEQ ID NO: 1642 - protein, 1323 aa, Sorghum bicolor
MILEASYLDSVPTAPDDAHVAPQSPAYIPVSALWWGNKQTNCTPTVQDEIVFGPGVQQQEPGGSQAGSMDEVGVISGLVTKMDIDTATERGPTAAAMTSSPAGVPPPPPENQQPPNLYTGLFCELPAPVLQAPAPGEPAPRARKMKKPTVSTRSSSRLAARPSAVPVAQRAQRKLMQELSFIDNNQQQAPDAAVTEYLDLYADDLPEQAVKAIQTAARLGNKRLVKILEAVETKLDAIDGLLAMEFLGNNYYSSFEFLPADNTRGGVLIAWDQDYIRGNLVRQDRFCLSIDITLRLTNHSFVLTTVYGPANNTEKNSFLAELIRCQPRGRPWLCLGDFNLICEAQDKNNNNINRAHMRKFRQALDASELLEIKLQNRKYTWSNGRKNPTLVHLDRAFCNLDWDEIFPSATLIALSSSLSDHCPLFLCNQQQPHRRATFKFESFWVRVPGFLQIVQTAWALPVRGSNPLTLLHNRLRNAAEALKKWSKSLFSEARLQLELANEVILRLDIAQESRPLSDAEVDLHRQLKLQLLGWAAIERSRRRQSSRIINIKEGDACTKFFHQRAKGRRKRNLITYLKNEGGLDQPFTLEELKHTVDELPAEKAPGPDGFNGLFYKKCWEIIKTDILAAMNSFHSLRAGPMRSLNGANITLIPKSDNAEDPKDFRPISLIHSFGKFVTKTLAIRLSPHIDRMISNSQSAFIKHRCIQDNFMYVRNLARAYHRKKIPALLFKLDISKAFDTISWEYLLELLEQRGFSARWREWLTLIFKTSHSTVLLNGTEGRQINHVRGLRQGDPLSPFLFILAIDTLHRILEVATANGFLSPLRGRNARLRLSLYADDAVIFINPIREEVTALFEILEQFGATTGLKLNIGKCTVAPIRCAEINLDHVLEGYRGNKTNFPITYLGLPLSLGRLKVVHLQKIVDKSRSRLAAWQGRLMNPAGRRELVRSVLSSMPVYLMTTLKAPKQLIADIDQMRRRFLWAGDNEISGGKCKVAWTAVAKPEEFGGLGIIDLDKFSRALRLRWLWFQWTKPERPWNGSELPVNADDVALFNAATTVTVRDGRKASFWHSSWIEGRAPASLWPRLYAHSRKKNRTVREALLNRRWVSDIAHNLNQDLLKEYFEFWLAIDRVRPALDEAGGDIIIWGLESSVCWPSPIPFPSLNLESLGTAKVQILLMAAVKNRLWTSARLQQRHWKNNYFCALCERNLETAHHLFFECPYSRLVWQAVSSWSSCPSLQPASWEDRSRLEDCFSQTLTTGEKKAHTLAILTLWSIWNRRNAVVFREDRKTTISLVVEIKDMARQWSLAGCKALRPLMVAHVISE

SEQ ID NO: 1643 - protein, 1998 aa, Sorghum bicolor
MAFQRADPAPFLPDHLEVQDVPNRRFMTRAVAPVRPLARNENLAIVTIDPIPGNPMHFAAVRGVLRDFLREEVRMPYLDIQPTSLGQAMVRLKYAHARDALVQDSPHVFDNVLVTFTKHDRGRNWRAADFNHECWLLLLDFPRDYLSERHIYQAVGDFAKVLLVQLEEGSESSLLIRAKVKDVEQVPQYVVLEDPDTIGGESFTIQCEVLRQKQPYEEPPPQDPVPDNNVIEQALPFDFIGLGQPVHNPGNQLQGQGQAGWDAWPEEDQDVNRDLEEAEEILEDIQLAQQNIGIFEQHGIGGNADMAEGLDLNQPPMDQDLDPVIINPVENDPFGHGEQIQYLLQEQGEVYQNNPVVQVEVHELGVGIGAMAQEVVEAPPEAVQAPAEIPQQNQQGPPLNFLVEEFSPEQLMNSEDLLENQSQEEEENNLGSQQNSSRGNSRQNQTSRGDTRQNQIQINGPPAQDVQQDGWADHLNQSKAQETFQALEQAVGPMEIENHQRMSGQEGSQKSHDSNNHLQITNNEIDLLNNFNQINQALIPDENQVLEAMVADNFHQEQSIQIGLTLTRIKDNQMAWSQATNAEATRLSTRFFSSGNPANLQVSIPATWVNFFTAQLLDPNNFDWIRNILASGLIGHLDSTDSGIVDFSVPTSRPEFNLSCLTDSLGKEQQTSQEYAKEAPPKKRYNKRTAAVVETEGKRKKAYPVARARITLAEVEERRFNQHTRQMKPRNEEAQRKQVWRGCLQPTLDSGFCRALLLAEIICLKFLAQTVMSRGQCVVLSMGYLLPTFVPMSYRSELKSVVSLVKSWNILHWNVRGLNSKEKWNPIRNKIVDLAVDIICLQETKKDSFDIAFLRNICPPDFDRFEYLPLVGASGGILTAWKSKLFSGELIFSNEYAISIQMSSMHNNDSWLLTNVYAPCTDEGKRQFVNWFKNIQTPHEVDWLVVGDFNLMRKHEDRNKEGGDSSEMFLFNSAISSLGLNEIILQGRKYTWSNMQSNPLLQKIDWTFTSNSWNIKFLDTSVKGYDMTPSDHAPCLVKVSTKIPKTKVFRFENCWLRLPGFQQIISDVWNVPTHHLDQAKSITAKFKKLRKALKEKQASMAHLKTVISKVKLVIQFLELLEEYRDLSMLEWNFRAILKKKLTELLEQQKIYWRQRGAIKWIKLGDATTKFFHANATIKMRGNLVNQLQKQDGSILTAHKDKEQHIWEEFKERLGTKEETRFGINPDTILQASNDLETLEEPFTETEIESVVKLLPNDKSPGPDGFSNEFMKASWQTVKVDIFNLCHAFHNHNVCLRSINTSFITLIPKSHNPVSVNDYRPISLLNTSMKLITKLLANRLQMKITDLVHKNQYGFIRQRTIQDCLAWSFEYLHLCHHSRKAIVIIKLDFEKAFDKMNHKAMLTIMKAKGFGQKWLNWMKSIFTSGTSNVLLNGTPGKTIHCLRGVRQGDPLSPLLFVLAADFLQSLINKAKCMDLLKLPIPMQTNQDFPIIQYADDTLIIAEGDTRQLLILKSIINTFSEATGLKVNLQKSMMLPINMDEERLDTLARTFGCSKGSFPFTYLGLPLGITKPTIQDYQPLINKCEARLGSVATFLSEAGRLELTNAVFTALPTFYMCTLAIPKSVIHKIDKFRKHCLWRGNGINARKPPKAAWKLVCKPKNEGGLGVIDIEKQNEALLMKNLDKFFNKKDTPWVQMIWDKHYAKGKLPGQIRKGSFWWRDILKLLDPYKEMSLIQMKGGESIVFWQDKWGMQKLRLEMPELFSFVQHKFLSAAEVLGQEDFTRLLQLPISETAFHQLQQLTTRIDNLERTQEQDQWKYKWGNNFSATKAYSELMGHQQIHEVHKWIWKSFCQPKHKVFFWLLIKDRLSTCNILKRKNMQLQSYNCVLCLQNSEETTSHLFLHCAYARQCWQLLDMDIPPNSDFPEITDHFKHGFNNQFFMVTTILLCWAIWSTRNNLIFRGIQPTIEGTKEIFKRELLLLEHRVKASNSSQFLQWIQLLV

SEQ ID NO: 1644 - protein, 131 aa, Chlorella vulgaris
MSTKTNEILDILKSITLLEAAELVSQIEETFGVDASAPVGGGFMAAPGGAGTAAAEIVEEKTTFDVIIEDVASDKRVPVLKVVRNLTSLDLKEAKEAITSLPKVIQQGVSKDDAEASKKQLEDAGAKVKIS

SEQ ID NO: 1645 - protein, 438 aa, Pyrococcus furiosus
MLRTHYSNEITEELNGKRVKVAGWVQEVKDLGGIKFVWIRDREGIVQITAPKKKVSEEIFKLIPKLNSEDVVVVEGIVNFTPKAKLGFEIIPEKFEILNRTQTPLPLDPTGKVKAELDTRLDNRFIDLRNPKVMAIFKIRSNVFRAIREFFYNEGFIEIHTPKIIATATEGGTELFPIKYFENDAFLAQSPQLYKQIMMATGLDKVFETAPIFRAEEHNTTRHLNEAWSIDAEIAFIENEEEVMDVLENLVVYAINYVREHNERELKILEFELEEPKQPFPRVTYDKALEILSDLGKEIPWGEDIDTEGEKLLGKYMSENEGVELYFIYKYPSEAKPFYIMKYDEKPEICRAFDLEYRGIEISSGGQREHRYEVLLEQIKEKGLNPESFEFYLKAFKYGMPPHGGFGLGAERLIMRMLNIGNIREVILFPRDRKRLIP

SEQ ID NO: 1646 - protein, 132 aa, Thermosynechococcus elongatus
MSAATDEILEKLKSLTLLEAAELVKQIEETFGVSAAAPVGGMMVAAPVAGAAAAPAEEVEEKTAFDVILEEVPADKKIAVLKVVRSLTGLGLKEAKEVVESTPKPVKEGASKEDAEAAKKELEEAGAKVSIK

SEQ ID NO: 1647 - protein, 806 aa, Thermosynechococcus elongatus
MPSDGAALKRYSGSGASSENGVIEFANCAWTRAIGQGWETPYRVRYASNLDDGPWYGMPLGGFGAGCIGRSSAGDFNLWHVDGGEHIFGTLPACQFSLFEQGEQTQAYALGSAPKDGRLSSWQWYPAGKGTYAVRYPRSWFVYEGVFRAQITCEQFSPILPHNYQETSYPVAVFLWTFSNPTDQSLTLSLMLSWQNTVGWFCNTTPSSAIAIRDDGSPVYTYTPRWGQSDGNFNELIQTESFQGWRLRRMPHPNPPQEGDGEWAALIPTGLGEFFGCSRWQPEGDGAHLWQSFSVDGSLPFVNDPTPAAAGEQVAAAFALRFSLAPGERKQIPVVLAWDFPVTEFGKGVIYYRRYTDFCDRHGTNAVTLAAQALAAYATWQEQIRTWQAPILSHPDWPDWFKMALCNELYVLSSGGSLWSAASDRDPVGQFAVLECLDYRWYESLDVRLYGSFALLQLWPELEKSVMRAFARAIPTADPTLRIIGYFYRGDPETAYKAPRKLANAVPHDLGAPNEHPWEKTNYTAYQDCNLWKDLASDFVLLVYRDFLFTGGTDLNFARECWPAVVAALDHLKQFDQDGDGLPENGGAPDQTYDDWKLQGVSAYCGGLWLAALEAAIALGTLLQQPQVEIYRQWLSQARPRYHQLLWNGEYYRLDTGSGSDVIMADQLCGQFYAQLLGLVDIVPPDCCDRALRKIYDTCFLKFHNGQFGAANGLLPNGQPENPHATHPLEVWTGINFGLAAFLWQRGMIDEAWRLAEVVVRQIYENGLQFRTPEAITANGTFRACMYLRPMAIWALALVSGGSRLP

SEQ ID NO: 1648 - protein, 348 aa, Thermosynechococcus elongatus
MTDYAAHQQALDRDCLTLSRHVLQQLQSFDAAAQDLSALMNRIALAGKLIARRLSRAGLMEGVLGFTGAVNIQGEDVKKMDVYANEVFIAAFKQSGLVCRLASEEMAQPYYIPENCPIGRYTLLYDPLDGSSNVDINLNVGSIFAIRQQEGTDLDSTAADLLQDGHQQIAAGYILYGPSTMLVYSLGKGTHVFVLDPSLGEFILAIENLQIPASGAIYSVNEGNFWAWEEPIRNYVRHVHRQPGYSARYSGALVADIHRILMEGGVFLYPGTQKNPAGKLRLLYEAAPIAFLVEQAGGKASTGTQPLLDVVPDHLHMRTPLIVGSPENVALVESFIQQTPAQPTVTQV

SEQ ID NO: 1649 - protein, 363 aa, Arabidopsis thaliana
MSSDAARTPLLPTEKIDTMAQDFNLNSRTSSSRKRRLRRSRSAPRGDCMYNDDVKIDEPPPHPSKIPMFSDLNPNLRRVIMFLALYLTIGTLCFYLVRDQISGHKTSGVVDALYFCIVTMTTVGYGDLVPNSSASRLLACAFVFSGMVLVGHLLSRAADYLVEKQEALLVRAFHLRQSFGPTDILKELHTNKLRYKCYATCLVLVVLFIVGTIFLVMVEKMPVISAFYCVCSTVTTLGYGDKSFNSEAGRLFAVFWILTSTICLAQFFLYVAELNTENKQRALVKWVLTRRITNNDLEAADLDEDGVVGAAEFIVYKLKEMGKIDEKDISGIMDEFEQLDYDESGTLTTSDIVLAQTTSQIQR

SEQ ID NO: 1650 - protein, 1108 aa, Arabidopsis thaliana
MSPAAVEIGSPVEKVSSVLNPMENFSAFFPESVHSHDQRTMGSSFSFGFGAGSGQTTKTRHKPRLVKLRKNGREVKKPSFSGEILSGFNPFAPPGKGSLHMNSGNDRDAGQSPGDKCFVFGASGNSSGAKSSPGNATIASLSDEEEFSTPIGDSELDSESIKEHSNGVRGKVDNDRENIRPCSESTIFDATNGFRFDGGVNGSWKSVENPDAVKEFFRRQNGMDKASASKSCSKSNSVQYAHGKNRDDPELNLLADMEKLNISDSRVHGGSDYEEASKSNKTPVFTFSSFGKVDPICKEGAATSEPYSFSSNGFQQSNNASGENPTFHSQTTYGNNLTNTSFATKTFFDDFKVPEWDPSLLKDSLFPEVDRNPVHARSNRSSKDKRSKKVKEKMKQGEPDRCNGQTAEGIEAQEKLNSPGYCSPMDYSPYQGDKTSNQFPTETPLAPSHSREHIDSRSSNDFKVASARDSSLFTAEDHGSTCIPNFSFSASTSQETIRHKKLQAVKKYRRKVNNSLPKSNLNATMRNNQENQPVNTGQAKQDSGSTSMMPDVCEVWRLRGNQAYKNGYMSKAEECYTHGINSSPSKDNSEYSVKPLALCYGNRAAARISLGRLREAISDCEMAASLDPSYIKAYMRAANCHLVLGELGSAVQYFNKCMKSTSSVCLDRRTTIEAAEGLQQAQRVADFTSCASIFLEKRTPDGASDALVPIANALSISSCSDKLLQMKAEALFMIRRYKEVIELCENTLQTAERNFVSAGIGGTTNVNGLGSTYHSLIVWRWNKISKSHFYLGNLEKALDILEKLQQVEYTCNENQEECRESPASLVATISELLRYKNAGNEAVRDRKYMEAVEQYTAALSRNVDSRPFAAICFCNRAAANQALVQIADAIADCSLAMALDENYTKAVSRRATLHEMIRDYDQAASDLQRLISILVKQSDKTKTPETSVDRASSRKELKQARQRLSVMEEKSKEGIHLDFFLIMGVKTSDSAADIKKAYRKAALRHHPDKAAQILVRSESEGPWLKEILEEVHKGADRLFKMIGEAYSVLSDPTKRSDYELEEEIRKARASRESYRSRKAAEASSPPYQTSRRYWKDSWRTNQNTPSWW

SEQ ID NO: 1651 - protein, 1871 aa, Arabidopsis thaliana
MVTKKKRPPPPVPFSSKFARVLASASAPPVPPSAPLVRSDLVDRDLIPPGSFTIIPDSLVEMQGTLPISPVIGSATTSALVACSGSVSHSTGSIGQSSVVVAAEDAISALIISAPVGPSDASIGSASAALVDLAVVDGSYTPSPVGLTLSVALGSDGSSAAHGLGLSTTISTGIIGGAPAAKVFSVADSPGLTAPVVGTLSGSSTLLESSSNVAAAAPSSISLLSGDNPSVKPPSNPSANVTEPSPTSDLPWATKFKASLRNLKKMSSPTFMEDGTPVVIAPPSVLLKTAELWKGHVVAQFHGLCPSANRIFSDLNPIWGNFGDITIRIVSDTVALIFIPAVNTRLWVTDIGFWQAGNCSCTVYPWSPEGLRDIKELKSAPTWAVLKNVPPQLYSLEGISVIASGIGEPLHTEKSRLDPISIGSTKVKVIINLDTPLPSAIVIRDIQGNSSRVAVEYPRPPPKCLNCGKYGHLLSRCPLPLSQKLPFKKDLPSGSKEVLHSSTFLAGAPATLSFSAPVMTGDGVDAKIKPKKRRSRSRSLKRSKSTPPRIAGSLDTLQLVQTSIRKKENSRKWVPKSIVDLSASLPINSPITIDSEIPSLKASKPERSMRDSIKDPDPDQRRRNSRSGTIESVLRVWELKVLIEVFCWNIRGLNNRIRQRVVRRWIASNNLLVGCLLETHVAEANASAVLASTLPGWRFDSNYCCSDLGRIWIVWDPSISVLVFKRTEQLILCSIKLPDLPQSFVVAFVYGRNTDLERRSLWDDISTLASSSPLSRTPWLILGDFNQIAATNEHFSIIQSTFSLRGMKDLQICMRDNLLADIPSRGGFFTWSNHQQDNPILRKLDRALASGTWFSQFPSALAVFDPPTASDHAPCIVLIENQPAVSKKSFKYFFFLSSHPTFLAALILAWRDNSIVGSKMFSLGRHMRAAKRCCRNLNRLRFSNIQQRTDQALANLEDIQADLLSAPSDVLFRREHVARKQWDFFAAALESFYRQKSRIRWLHEGDANTRFFHKAVIAHQAINLIRLLRGPDGSRIDNVDQIKGMLISYYTHLLGTPNDDVTPFSVERIQSLHPFRCDSSLATQLTAIPSDEEITMALFSMPRNKAPGPDGFPVEFFVEAWPIVKESVIAAIKEFFLTGHLLKGFNATAITLIPKVPGADQLNLFRPVACCTTIYKVITRLISKRLKLFIDQAVQSNQVGFIKGRLLCENVLLASELVDNFQAEGDTSRGCLQVDLTKAYDNVNWEFLINILKALNLPPIFINWIWVCISTPSYSIAYNGELIGFFAGKKGIRQGDPMSSHLFVLVMDILARSLDLGAVEGRFVLHPKCLAPMITHLSFADDILVFCDGSLSSLAAILDILDVFKKGSGLGINLQKTALLLDGGNFERNRIKAASLGVSQGSLPVRYLGLPLMSQKMKKHDYQPLVDRINSRFSSWTARHLSFAGRLQLLKSVIYSTINFWASIFILPNQCLHKLEQLCNAFLWSGAPNSARGAKISWDIVCSSKESGGLGLKRLSSWNKVLALKLIWLLFTASGSLWVSWVRLHLIGRRNFWNLNPYLSGSWVWRKLCKLREVARPFVICEVGSGITASFWQDNWTGHGPLIHLTGLTGPQLVGLSITSVVRDAIRNDDWWIASSRSRNPVILLLKSLLPPVGNLVDCEHDDSYLWKVGDRVPSSKFSTADTWRALQPFSVSVSWHKAVWFTNQVPKHAFISWVTAWNRLHTRDRLRSWGLLVHAECVLCNLVDETRDHLFFACRFSSRIWTFFMRAVGFSPPPQFMNCLLWLNSATRDKNLMLIIKLLFQASVYFIWKERNARIQFEIRRPSHLITKEIQMVIRARLDPLSRSRAPGRSGLSLLGSWFSLFLNRDPPQV

SEQ ID NO: 1652 - protein, 350 aa, Arabidopsis thaliana
MQIFSCFCCGKGFDRQKKVKTEPSWRIFSLKELHAATNSFNYDNKLGEGRFGSVYWGQLWDGSQIAVKRLKAWSSREEIDFAVEVEILARIRHKNLLSVRGYCAEGQERLIVYDYMPNLSLVSHLHGQHSSESLLDWTRRMNIAVSSAQAIAYLHHFATPRIVHGDVRASNVLLDSEFEARVTDFGYDKLMPDDGANKSTKGNNIGYLSPECIESGKESDMGDVYSFGVLLLELVTGKRPTERVNLTTKRGITEWVLPLVYERKFGEIVDQRLNGKYVEEELKRIVLVGLMCAQRESEKRPTMSEVVEMLMIESKEKMAQLEANPLFNGNNDGEVIDESSEIISEVRDHQ

SEQ ID NO: 1653 - protein, 442 aa, Arabidopsis thaliana
MSSSSRNLSQENPIPRPNLAKTRTSLRDVGNRRAPLGDITNQKNGSRNPSPSSTLVNCSNKIGQSKKAPKPALSRNWNLGILDSGLPPKPNAKSNIIVPYEDTELLQSDDSLLCSSPALSLDASPTQSDPSISTHDSLTNHVVDYMVESTTDDGNDDDDDEIVNIDSDLMDPQLCASFACDIYEHLRVSEVNKRPALDYMERTQSSINASMRSILIDWLVEVAEEYRLSPETLYLAVNYVDRYLTGNAINKQNLQLLGVTCMMIAAKYEEVCVPQVEDFCYITDNTYLRNELLEMESSVLNYLKFELTTPTAKCFLRRFLRAAQGRKEVPSLLSECLACYLTELSLLDYAMLRYAPSLVAASAVFLAQYTLHPSRKPWNATLEHYTSYRAKHMEACVKNLLQLCNEKLSSDVVAIRKKYSQHKYKFAAKKLCPTSLPQELFL

SEQ ID NO: 1654 - protein, 1089 aa, Arabidopsis thaliana
MAHSVCFDPAVTANLSLSAFHATVRFSEISVIPLNLSNFLEEALEVGLLKNQIFCSGFNRRRLVLGSVTQKAALETMEEVQPPVTPPIEPNGKRSEASLLDICEKVLSLDGSTCDEALKLFTETKRILSASMSNIGSGTREEVERFWFAFILYSVKRLSVRKEADGLSVSGDNEFNLCQILRALKLNIVDFFKELPQFVVKAGSVLGELYGADWENRLQAKEVQANFVHLSLLSKYYKRGFREFFLTYDANAEKNSANSSTYLLDSYRFGWLLFLALRNHAFSRFKDLVTCSNGVVSILAILIIHVPCRFRNFSIQDSSRFVKKGDKGVDLVASLCKIYDASEDELRIVIDKANNLVETILKKKPSPASECQTDKLDNIDPDGLTYFEDLLEETSISTSLITLEKDYYDGKGELDERVFINEEDSLLGSGSLSAGAVNITGVKRKIDALSSPARTFISPLSPHKSPAAKTNGISGATKLAATPVSTAMTTAKWLRTVISPLLPKPSPGLEHFLKSCDRDITNDVTRRAHIILEAIFPNSSLGAQCGGGSLQAVDLMDDIWAEQRRLEACKLYYRVLEAMCKAEAQILHANNLNSLLTNERFHRCMLACSAELVLATHKTITMLFPAVLERTGITAFDLSKVIESFIRHEDSLPRELRRHLNSLEERLLESMVWEKGSSMYNSLIVARPSLALEINQLGLLAEPMPSLDAIAALINFSDGANHASSVQKHETCPGQNGGIRSPKRLCTDYRSILVERNSFTSPVKDRLLALGNVKSKMLPPPLQSAFASPTRPNPGGGGETCAETGINIFFTKINKLAAVRINGMVERLQLSQQIRESVYCFFQHVLAQRTSLLFSRHIDQIILCCFYGVAKISQMSLTFREIIYNYRKQPQCKPLVFRSVYVDALQCRRQGRIGPDHVDIITFYNEIFIPAVKPLLVELGPVRNDRAVEANNKPEGQCPGSPKVSVFPSVPDMSPKKVSAVHNVYVSPLRGSKMDALISHSTKSYYACVGESTHAYQSPSKDLSAINNRLNNSSSNRKRTLNFDAEAGMVSDSMVANSLNLQNQNQNQNGSDASSSGGAAPLKTEPTDS

SEQ ID NO: 1655 - protein, 950 aa, Arabidopsis thaliana
MVGATLFHRRKHSWPTEEFISRSTLQLLDFDSAAPPPHAWRRRLNCHANILKEFTITFREAIKMVRLGIRLWSYVREEASHGRKAPIDPFTKENCKPSASQGVPLGGMGSGSISRGFRGEFKQWQITPGTCDPSPMMSNQFSIFISRDGGHKKYASVLSPGQHGSLGKSRDKGLSSWGWNLNGQHSTYHALFPRAWTIYDGEPDPELKISCRQISPFIPNNYRDSSLPAAVFVYTLVNTGKERAKVSLLFTWANSMGGTSHMSGGHVNEPFIGEDGVSGVLLHHKTGKGNPPVTFAIAASETQNVNVTVLPCFGLSEDSSFTAKDMWDTMEQDGKFDQENFNSGPSTPSLAGDTICAAVSASAWVEAHGKCTVSFALSWSSPKVKFSKGSTYDRRYTKFYGTSPRAALDLVHDALTNYKRWEEDIEAWQNPILRDERLPEWYKFTLFNELYFLVAGGTVWIDSSSLNANGNSQHQQSGLGNSDGKVGGLDINDQRNDLGNGNSVGVKSNDEVSAIHNRNGLFVDTPHVDDGDDVGRFLYLEGVEYVMWCTYDVHFYASYALLMLFPKIELNIQRDFAKAVLSEDGRKVKFLAEGNVGIRKVRGAVPHDLGMHDPWNEMNAYNIHDTSRWKDLNPKFVLQVYRDFAATGDYQFGIDVWPAVRAAMEYMEQFDRDNDDLIENDGFPDQTYDTWTVHGVSAYCGCLWLAALQAAAAMALQIGDKFFAELCKNKFLNAKAALETKLWNGSYFNYDSGSSSNSKSIQTDQLAGQWYAASSGLPPLFEESKIRSTMQKIFDFNVMKTKGGKMGAVNGMHPDGKVDDTCMQSREIWTGVTYAAAATMILSGMEEQGFTTAEGIFTAGWSEEGFGYWFQTPEGWTMDGHYRSLIYMRPLAIWGMQWALSLPKAILDAPQINMMDRVHLSPRSRRFSNNFKVVKHKAKCFGNSALSCSC

SEQ ID NO: 1656 - protein, 130 aa, Spinacia oleracea
AVEAPEKIEQLGTQLSGLTLEEARVLVDWLQDKLGVSAASFAPAAAVAAPGAPADAVEEKTEFDVSIDEVPSNARISVIKAVRALTSLGLKEAKELIEGLPKKLKEGVSKDDAEDAKKQLEDAGAKVISV

SEQ ID NO: 1657 - protein, 124 aa, Rhodobacter sphaeroides
ADLNKLAEDIVGLTLLEAQELKTILKDKYGIEPAAGGAVMMAGPAAGAAAPAEEEKTEFDVGLTDAGANKINVIKEVRAITGLGLKEAKDLVEAGGKVKEAVAKADAEAMKKKLEEAGAKVELK

SEQ ID NO: 1658 - protein, 427 aa, Ferroplasma acidarmanus
MRTYIADIKTLDDGSDVTIKGWVQETRKIKNLMFIIMRDNTGSIQVTAKKDSMKNYDQLYDITRESVISVYGTLNKKSISKSGMEIQGIEIEILSIADTPLPLGVIDRVSADFDTRLNNRFLDLRKPEHLLIFQFESQLLFGIREFMNKENFIEVHTPKIVAAATEGGADLFRVEYFEKNAFLNQSPQLYKEILIASGFDKVFEVGPAFRAEKENTVRHLNEFTSIDMEAAFIDDKKAMEYLENAISYAVNRNIDLMHTKLEEYGYHLEKIETPFPRISYEDGIEYLNDHGLKLNFGDDFSPEANKILAEKFNGFYFITGWPSDMRPFYTHPDTNPALTKSFDLQLNDIEVTSGAQRIHNYKMLEDNFMKKGLNKNDFEFYEKAFKFGMPPHAGWGLGLERLVMNLLHLNNVRESTLFPRDRTRLSP

SEQ ID NO: 1659 - protein, 589 aa, Ferroplasma acidarmanus
MENKGSIYSISGPVVIATDLDGKMFDVVRVGEMGLVGEVIKIVGDKFTIQVYEDTSGLKPGEPVYSTGKPLSVELGPGLLKSIYDGIQRPLDIIQSETGDFIVRGATAPPLDEKKEWDFVPLLKEGDEVEQGYILGTVQETNIITHKIMVPYGIRGIIKSISKGKFKVSDTVCMIDTGTSKYDIKLKQIWPVRQARKVFLKFAPEIPLITGQRVIDSFFPVAKGGTVAVPGPFGSGKTVIQHQLSKWSDADITVYVGCGERGNEMTEILSTFPELQDPKSGKPLMEKTILIANTSNMPVAAREASIYTGVTIAEYYRDMGYDVALMADSTSRWAEALREISGRLEEMPGEEGYPAYLGRRISEFYERSGNAQIIAQDERTGSITLIGAVSPPGGDLSDPVVQNTLRVTRAFWALDASLASRRHFPSINWLNSYSLYLDSLSGWFKSNVNPEWPQMHSLMMGILQKESELQEIVQLVGYDSLPENQKNVLDIAKIIREDFLQQNAFDDTDTYCSIKKQYEMLTIIKTLNEMQEKSIASGLKLTQTATLPVRMKISRMKEIPENDFEKFYNDVIKEINNEYDNIMEGVESV

SEQ ID NO: 1660 - protein, 126 aa, Desulfovibrio vulgaris
SSITKEQVVEFIANMTVLELSEFIKELEEKFGVSAAAPAMMAVAAGPAEAAPAEEEKTEFDVILKAAGANKIGVIKVVRALTGLGLKEAKDKVDGAPSTLKEAVSKEEAEEAKKQLVEAGAEVEVK

SEQ ID NO: 1661 - protein, 577 aa, Arabidopsis thaliana
MTSVLGMMNPNLINGRNLHKGSSIFVQDKETKKRVQWRLSIKEGSLRTHQATASSATEPKATEFNTTTYEDKMLTNYVPVYVMLQLGVITNDNVLENEESLKKQLKKLKQSQVDGVMVDVWWGIVESKGPKQYQWSAYRNLFAIVQSFGLKLQAIMSFHRCGGNIGDDVNIPIPKWVLEIGDSNPDIFYTNKSGNRNKECLSLSVDNLSLFRGRTAVEMYRDYMKSFRENMEDFISSGVIIDIEVGLGPAGELRYPSYSETQGWVFPGIGEFQCYDKYLRSDYEEEVRRIGHPEWKLPENAGEYNSVPGETEFFEYSNGTYLKEEGNFFLSWYSKKLLLHGDQILDEANKVFLGCKLKIAAKVSGIHWWYKTESHAAELTAGYYNLKNRDGYRAIAKIMRRHHAILNFTCLEMKNTEQPAKAKSGPQELVQQVLSSGWREGIEVAGENALPRFDRNGYNQIILNARPNGVNQDGKPRMFGFTYLRLSDKLLNEPNFSTFKMFLKRMHANQEYCSEPERYNHELLPLERSRNDESLEMFMEETEPFDPFPWLDETDMSIRPFESVLSLLRSTFLRKKS

SEQ ID NO: 1662 - protein, 191 aa, Pseudomonas syringae
FLQVDTRNILFICGGAFSGLEKVIQNRSTRGGIGFNAEVRSKEEGKKVGESLREVEPDDLVKFGLIPEFVGRLPVLATLDELDEAALIQILTEPKNALTKQYAKLFEMEGVDLEFRTDALKSVARRALERKTGARGLRSILEGVLLDTMYEIPSQSDVSKVVIDESVIDGTSKPLLIYENNEPPAKVAPDA

SEQ ID NO: 1663 - protein, 500 aa, Streptococcus agalactiae
MNKRVKIVATLGPAVEFRGGKKFGESGYWGESLDVEASAEKIAQLIKEGANVFRFNFSHGDHAEQGARMATVRKAEEIAGQKVGFLLDTKGPEIRTELFEDGADFHSYTTGTKLRVATKQGIKSTPEVIALNVAGGLDIFDDVEVGKQILVDDGKLGLTVFAKDKDTREFEVVVENDGLIGKQKGVNIPYTKIPFPALAERDNADIRFGLEQGLNFIAISFVRTAKDVNEVRAICEETGNGHVKLFAKIENQQGIDNIDEIIEAADGIMIARGDMGIEVPFEMVPVYQKMIITKVNAAGKAVITATNMLETMTDKPRATRSEVSDVFNAVIDGTDATMLSGESANGKYPVESVRTMATIDKNAQTLLNEYGRLDSSAFPRNNKTDVIASAVKDATHSMDIKLVVTITETGNTARAISKFRPDADILAVTFDEKVQRSLMINWGVIPVLADKPASTDDMFEVAERVALEAGFVESGDNIVIVAGVPVGTGGTNTMRVRTVK

SEQ ID NO: 1664 - protein, 408 aa, Streptococcus agalactiae
MAGNRNNDMNVYCSFCGKSQDEVKKIIAGNGVFICNECVALSQEIIKEELAEEVLADLAEVPKPKELLEILNQYVVGQDRAKRALAVAVYNHYKRVSYTESSDDDVDLQKSNILMIGPTGSGKTFLAQTLAKSLNVPFAIADATSLTEAGYVGEDVENILLKLIQAADYNVERAERGIIYVDEIDKIAKKGENVSITRDVSGEGVQQALLKIIEGTVASVPPQGGRKHPNQEMIQINTKNILFIVGGAFDGIEDLVKQRLGEKVIGFGQTSRKIDDNASYMQEIISEDIQKFGLIPEFIGRLPVVAALELLTAEDLVRILTEPRNALVKQYQTLLSYDGVELEFDQDALLAIADKAIERKTGARGLRSIIEETMLDIMFEIPSQEDVTKVRITKAAVEGTDKPVLETA

SEQ ID NO: 1665 - protein, 510 aa, Solanum tuberosum
MANIDIAGIMKDLPNDGRIPKTKIVCTLGPSSRTVPMLEKLLRAGMNVARFNFSHGTHEYHQETLDNLKIAMQNTQILCAVMLDTKGPEIRTGFLTDGKPIQLKEGQEITVSTDYTIKGNEEMISMSYKKLVMDLKPGNTILCADGTITLTVLSCDPPSGTVRCRCENTATLGERKNVNLPGVVVDLPTLTEKDKEDILEWGVPNNIDMIALSFVRKGSDLVNVRKVLGPHAKRIQLMSKVENQEGVINFDEILRETDSFMVARGDLGMEIPVEKIFLAQKMMIYKCNLAGKAVVTATQMLESMIKSPAPTRAEATDVANAVLDGTDCVMLSGESAAGAYPELAVKIMSRICIEAESSLDNEAIFKEMIRCTPLPMSPLESLASSAVRTANKARAKLIVVLTRGGSTAKLVAKYRPAVPILSVVVPVLTTDSFDWSISDETPARHSLVYRGLIPLLGEGSAKATDSESTEVILEAALKSAVTRGLCKPGDAVVALHRIGSASVIKICVVK

SEQ ID NO: 1666 - protein, 675 aa, Phaseolus vulgaris
MAAVLRSLRRRDVASATFSAYRSLTGSTKPAYVAQKWSCLARPFSSRPAGNDVIGIDLGTTNSCVSVMEGKNPKVIENSEGARTTPSVVAFNQKGELLVGTPAKRQAVTNPTNTVFGTKRLIGRRFDDPQTQKEMKMVPFKIVKAPNGDAWVEANGQQYSPSQIGAFVLTKMKETAEAYLGKSVSKAVITVPAYFNDAQRQATKDAGRIAGLDVQRIINEPTAAALSYGMNNKEGLIAVFDLGGGTFDVSILEISNGVFEVKATNGDTFLGGEDFDNALLDFLVNEFKRTESIDLSKDRLALQRLREAAEKAKIELSSTSQTEINLPFITADASGAKHLNITLTRSKFEALVNHLIERTKAPCKSCLKDANVSIKDVDEVLLVGGMTRVPKVQEVVLNIFGKSPSKGVNPDEAVAMGAAIQGGILRGDVKELLLLDVTPLSLGIETLGGIFTRLINRNTTIPTKKSQVFSTAADNQTQVGIKVLQGEREMASDNKMLGEFDLVGIPPAPRGLPQIEVTFDIDANGIVTVSAKDKSTGKEQQITIRSSGGLSEDEIEKMVKEAELHAQKDQERKTLIDIRNSADTTIYSIEKSLGEYREKIPSETAKEIEDAVSDLRKAMSGDNVDEIKSKLDAANKAVSKIGEHMSGGSSGGSSAGGSQGGGDQAPEAEYEEVKK

SEQ ID NO: 1667 - protein, 498 aa, Arabidopsis thaliana
MATNYNEKLLLNYVPVYVMLPLGVVNVENVFADPETLETQLKRLKEEAGVDGVMVDVWWGIIESKGPKQYDWTAYKTLFQLIARLGLKIQAIMSFHQCGGNVGDIVTIPIPQWVRDVGDNDPDIYYTNRKGTRDIEYLSIGVDNLPLFAGRTAVQLYSDYMSSFKENMADLIEAGVIVDIEVGLGPAGELRYPSYPQSQGWVFPGIGEFQCYDKYLKKDFKEAAAKAGHPEWDLPEDAGEYNDKPEETGFFKKDGTYVSEKGKFFMTWYSNKLIFHGDQILGEANKIFAGLKVNLAAKVSGIHWLYNHHSHAAELTAGYYNLFKRDGYRPIARMLSKHYGILNFTCLEMKDTDNTAEALSAPQELVQEVLSKAWKEGIEVAGENALETYGAKGYNQILLNARPNGVNPNGKPKLRMYGFTYLRLSDTVFQENNFELFKKLVRKMHADQDYCGDAAKYGHEIVPLKTSNSQLTLEDIADAAQPSGAFKWDSETDLKVDG

SEQ ID NO: 1668 - protein, 1640 aa, Candida albicans
MFDYLMRLLDSRTSRLGPTHALRSIHADYIGGMNSNFRKWYFAAQLDIDDFVGFDNLAKNGKIKGSNDPVATLEQAESQWSTNMLALSPTDSVIQLAIYLLIWGEANNIRFMPECICFIFKCCNDFYFSIDPDTPVTTVTPSFLDHIITPLYNFYRDQSYILVDGKYRRRDKDHESVIGYDDMNQLFWYSKGLERLVLADKKSRLMSLPPGERYEELNQVLWNRVFYKTFKENRGWSHVLVNFHRVWIIHSAVFWYYTAFNSPTLYTKNYQPALDNQPTTQARLSVLAFGGVVAIVIDIISLLFELRFIPRKWTGAQPVSKRLALLILALILNVGPSVYLFMFIPLNVQNTVGLVISAFQFSFSVIMVLYLSTVPLGRLFSKKPKANDRRFLPQRSFVTNFYSLAEGDRVASYGLWFAIFVSKFIESYFFLTLSLRDPVRELSIMKMSRCAGEVWLGNWFCTRQPTIVLGLIYLTDLVLFILDTYLWYIVWNTVFSVCRSFYIGVSIWTPWRNIFSRLPKRIFSKIISVSGDKNIKSKLLVSQVWNSIIISMYREHLISLEHVQKLIYKQIDNPGVEGDSVLKEPIFFVSQEDQTIKSSLFQDQAEAQRRITFFAQSLSTPMPEVGPVHLMPSFTVLIPHYSEKITLSLREIIREEEQYSHVTMLEYLKSLHPLEWSCFVKDTKLLAEEFETDSSSAEIKREKLDDLPYYSVGFKVATPEYILRTRIWASLRSQTLYRTISGFMNYSRAIKLLFDVENPDSTKFGTENDKLEQAAIMAHRKFRIITSMQRLKYFTPEEKENTEFLLRAYPELQICYLDEEVDEASGEIVYYSALVDGSCAIMENGEREPKYRIRLSGNPILGDGKSDNQNHSLIFCRGEYIQLVDANQDNYLEECLKIRSILAEFEEATFPLDPYSTDLEGTESVYPVAIIGTREYIFSENIGILGDVAAGKEQTFGTLFARTLAHIGGKLHYGHPDFLNGIFMTTRGGVSKAQKGLHLNEDIYAGMNVVLRGGRIKHCEYMQCGKGRDLGFGSILNFTTKIGAGMGEQMLSREYFYMGTQLPLDRFLSFYYAHSGFHLNNLFIMLSIHLFLLVGANLAALTSESTICEYDRFRPITDPKRPHGCYNLIPVVHWLQRCIFSIFIVFVISFVPLAVQELTERGFYKAITRLGKQFASFSPLFEVFVCKIYAHSLSSDISIGGARYLATGRGFATIRVPFATLYSRFAVESLYYGSICGLLIFYCSLSMWKLQLLYFWITILGLLICPFLYNPNQFSWNDFFLDYKECIQWFYRGNSKPRLSSWINFTRLKRSRIVGVKSKRYSINEEIKVVSEVKPSRFKLIISESFLQLCVITLVGLAYLFTNSQNGSRGTYPVNSILRILIISFVPIGVNLVILIACFVVSISIGPIFTLFCKKFPSFVAAIAHLLAVANHVFFFELLWLFQNWNFSVTVLGFALSALIQCWFLQMMTILLVSREFRHDRSNRSWWSGKWATAGLGWYIITQPMREAVCKLSEMSYFAGDLVATHIILFAQIPILLIPYADKWHTLMLFWLKPGNQIRPRILSKRQKRRRRFQANLYLLIFLLGLILFSSIFVLPLIATKYFDIEFSEYIPEFFHPLFQPYDAPTNSKGLKKKLEIKHY

SEQ ID NO: 1669 - protein, 504 aa, Oryza sativa
MKKLFFFLFLLILAASVVHGEDGAYIGVNIGTAMTSVPAPTQITTLLRSQNIRHVRLYDADPAMLAALANTGIRVIVSVPNEQLLAIGNSNATAANWVARNVAAHYPSVNITAIAVGSEVLSTLPNAAPLLMPAIRYLQNALVAAALDRYIKISTPHSSSIILDSFPPSQAFFNRSLDPVLVPLLKFLQSTGSPLMLNVYPYYDYMRSNGVIPLDYALFRPLPPNKEAVDANTLLHYTNVFDAVVDAAYFAMAYLNVTNVPVMVTETGWPHKGDPSNEPDATSDNADTYNSNLIRHVMNTTGTPKHPGVAVPTYIYELYDEDTRPGSTSEKYWGLFDMNGIPAYTLHLTGSGVLLANDTTNQTYCVAREGADEKMLQAALDWACGPGKVDCSALMQGQPCYDPDNVEAHATYAFNAYYHGMGMGSGTCYFSGVAVITTTDPSHGSCVYAGSGGKNGTSLLNGTSLAPSSNSTAGDSGAHRAIGDVSSFVRAVVAALLLSVVLLL

SEQ ID NO: 1670 - protein, 1090 aa, Candida albicans
MSFNSPSLYTPNYTPNKSPQVHIRLAIVSIGGIIAVLISLGAAISDFFFVSGSVRNIVLLLILTVANSGSIVYNLGLLKWDKYSKNGTVVAAISMCLSVLTFLFLAINPPGSFKTVFSNNFPKLKLRSRLFSISLWIGVFAAKYSESYFFLILSLKDPIQILSTIELNCDNGHFLCRFQPKITLILFYLTDLILFFLDTYLWYVICNCLFSVGLSFSLGVSIFTPWKNIFSRLPDRILTKIYYGDSTELILVISQIWNSIIISMYREHVLSVEQVCKLIYQRGADENTIRPPLFFVYEDDNKFYDFIKIEKEWERRITFFAQSLSSPLPEPFPVVSTPTFTVLIPHYSEKILLSLQDLIKEQSFSKLTLLDYLKQLHSKEWDSFVQDSKMIQTIKEMDEDKFVRENMDDLPYYCIGFKDSSPENVLRTRIWAALRCQTLYRTVSGFMNYVTALKLLYRTEVIGFEQNEFPEEELEEFVSRKFNLLIAMQNFQNFAPDMRTDADSLFKAFPNVKVAILESDNDQDYYSTLLDVSKRDDKNQYVKKYRIKLSGNPILGDGKSDNQNSALIFYRGEYIQVIDSNQDNYIEECLKIKSLLNEFEEMNLDVSFGYQTEHPETSSVAIVGAREFIFSQNIGILGDIAAAKEQTFGTLFARTMGEIGSKLHYGHPDLLNGIFMTTRGGISKAQRGLHLNEDIYAGITATCRGGRIKHSDYYQCGKGRDLGFQSIVNFTKKIGSGMGEQLLSREYYYLGSMLPIDKFLSFYYAHAGFHINNLSIMLSVKAFMFLLMSLGALNNGTAACTEDNPTPGCHNLVPVLNWIDRFVLSVFVCFFISFLPLIIQEFIEKGLLKAILRILLHIVSLSPFFEVFVCQVYSRALRDNFIFGEAKYIATGRGFAISRVSFATLYSRYASLSIYYGGEIFLVILFASITIWRKSLLWFVITIISLCLAPFIFNPHQFNFVDFFVDYRDYVRWLTRGNSSLKESSWTHYTKVRRARLTGEKFDGGYVSGRNTATFNLLLGEVASPSINLILYLLPYLFLHSSPKSTCIQCEKSTNKVNSSCIGTLSREFGGSFLRMGNVLNSCAIGWNMV

SEQ ID NO: 1671 - protein, 820 aa, Oryza sativa
MAMTITDNLSFIITVVNGPSEDCDKENFLAELVAAKPPTDTPWLVMGDFNIIYEARDKNNQNLNRRLMGRFRLDVALETRTLIAEEHQFRKDLKIRILGLAAVEKARKKQASRVKWLKEGDANTRFFHIKMNARRRKNFIHCLQQDGNTLHTHEDKAAHLHAHFNSILGTRRQRGCTLNWEALRLSTIQDDSMDEPFTEDEIWEAIKNSPKEKAPGPDDFTGAFYKNCWHIIKKEIVDVFASFHNLTGGNFGSINRAMITLLPKKDSPRSMNDFRPISLIHSVAKLISKTLAMRLAARLGDLVSHAQSAFIKKRCIQDNFLYVRNMARSLHMQRKPSLFFKLDITKAFDSVSWEYLVEMLQCRGFSQHWRNWIVLLLSTASSRILLNGIAGEPTTHRRGLRQGDPLSPYLFILAIDPIQRLLNKATQEGLLSPLSNRAARFKISLYADDAAIFINSIRNDVNNLISILKFFGEATSLQVNLHKSSVVPIKCAEQNLSEVLENFNGQRGNFPITYLGLPLTPGHIKRIHLQPVMDKLQSRLAGWKGKLIQQSGRKTLVTSVLSSIPTYFLTALKPPKQFLTDMNKIRKKFLWAGDQEISGGKCKVNWKKVCSPIKMGGLGVLDLDKFARALRLRWLWFEWECPDKPWVGTTPPCDELDEQIFAAATKVTIGNGRKAKFWTSNWIGHQPLKYLAPALFNHSKGKQRLVQDALTNDKWIEDIRHELSMPLIREFFAVFRLIWDNETNLEEGVEDTIIWRWTNTGKYTAKSAYLAQFVGREDSRAATLIWKIWAPSKCKNFAWLVLQNRIWTSDRLQLRQWPNN

SEQ ID NO: 1672 - protein, 1583 aa, Cryptococcus neoformans
EPNYPPSDYHGGPGYLPSRASTPTFEGSNAGHRPREPYPAWTVDANIPLSKEEIEDVLIDLANKFGFQKDSSRNVYDFLMIQLDSRASRMSPNQALLTLHADYIGGEHANYRKWYFAAQLDLDDAIGAVQNPGLSRVRSVARRGGKTKNPLATAQEKSLESATSRWRTAMNNMSQYDRLRQVALYLLCWGEAAQVRFMPECLCFIFKCADDYYRSPECQNRQEAVPEGLYLRAVIKPLYRFLRDQGYEVVDGKFLRRERDHDKIIGYDDVNQLFWYPEGISRITLNDNTRLVDIPPAQRFMKFDRIDWNKVFFKTYLEKRSFFHLLVNFNRIWVLHISVFWFFTAYNAPSIYAPSGSTTATTPMAWSMTGLGGFVATLIMIAATLAEFSYIPTTWNNTSHLTRRLIFLLIILAITGGPSIYIAFFNQTGHVALILGIVQFFCSVVATIAFATLPSGRMFGDRVAGKSRKYLANQTFTASYPALGFYPRVASFLLWFLIFGCKFTESYFFLTLSFRDPMKVMNGMKVQNCHDKYFGSGLCTNQPAFALAVMFVMDLTLFFLDTFLWYVIWNTVFSIARSFAIGMSIWTPWKDIFARLPKRIYAKILATDDMEVKYKPKVLVSQVWNAVIISMYRGHLLSIDHVQKLLYHQIQSDQPGKRTLRAPAFFISQSEKGSKAEFFPKGSEAERRICFFAQSLTTSVPAPIPVDAMPTFTVLVPHYSEKILLSLREIIREEDQNTRVTLLEYLKQLHPVEWDNFVRDTKILAEESDAFNGGNPFASDEKEEAKKADDIPFYTIGFKSAAPEYTLRTRIWASLRAQTLYRTVSGFMNYSKAIKLLYRVENPEVVQLFGGNTDQLERELERMARRKFKFVVSMQRYSKFNKEEHENAEFLLRAYPDLQIAYLDEEPPRKDGGESRIFSALIDGHSEIMPNGRRRPKFRIELPGNPILGDGKSDNQNHAIVFYRGEYLQLIDANQDNYLEECLKIRNVLGEFEEFKVSTQSPYAAQGHADFAKFPVAILGAREYIFSENIGILGDIAAGKEQTFGTLAARSLSYIGGKLHYGHPDFLNGIYMNTRGGVSKAQKGLHLNEDIFAGMLAFGRGGRIKHSEYYQCGKGRDLGFGTILNFQTKIGTGMGEQMLSREYYYLGTQLPIDRFLTFYYGHPGFHINNILVMMSVQVFMLALVFLGTLNKQLTVCKYSSAGDILPGQSGCYNLVPVFRWIKRCIISIFIVFWIAFVPLFVQELTERGTGRAILRLCKHFLSLSPVFEVFSTQIYMHSILNDLTFGGARYIATGRGFATTRISFSILYSRLAGPSIYLGMRTLVLLLFITLTVWVPHLIYFWITVVGLCIAPFLFNPHQFAIADFIIDYREFLHRMSRGNSRTHANSWVGYCRLSRTRVTGFKRKRLGLPNEKLSSDVPRAPWKAILIGEIIGPICLAILLVICYLFIKSFAVDGQIQPGLVRIAIIALGPIVWNMALLITLFLISVFLGPCLNSYTHQFGATMAALAHFGAVAGMIVFYELLWILELWNTSQAVFGIIAVISVQRCIFKFLIAVFLTREFKHDETNRAWWTGVWFNRGLGSH

SEQ ID NO: 1673 - protein, 708 aa, Oryza sativa
MISQHFLKKPPVKPYGPGALDDGLVQGREDKESELLSFFHQHLGVARERSSAINFSYLHEQAHDLADLEVPFTEEEIKRAVFQSRSDSAPGPDGFTGGFFKKCWEIIQQDLVQAVNRAFSSPPDRLRLINSAYIILLPKKENAFRVGDFRPISLIHFFGKLLSKLLANRLAPRLQQMVSANQSAFIKGKNIQDNFLFVNNMVKELHSSKTPAILLKLDIAKAFDSVSWAYLVDRLKALGFGHRWIDWIISILASSSSKVILNGRAGLSFMHGRGLRQGDPLSPMLFILAIDPLQKLLAAAQEEDLLQPLHRRIARFNVALYADDAVVFTRPDKQELHTVHSILQHFGQATGMITNLTKSEVYSIRCENLDLQDILAPFPAQQKTFPCTYLGLPLHIRKLRKMDVQPLIDRFSARLPKWKGKLLNKTGRSVLIKSTLSALPTYHLTVFPLKKWAAKKMDKIRRGFLWTGADQANGGHCLVNWKKSIYIENVEMMKATLRSFQKPWQGSTLPCDETDKQLFRASTIITLGNGGKTKFWHDRWLDGQSPKDLSPSLYKLAMWKNKTVAQELENHKWLRPLRRMNSTTEHLIQQVQLDEDREDDLMWKWNANGIYSANSAYKIQFTGSIQDNRANFIWSSSFNGNMMDWWEACRREMIKEQRRNFDGLFIYTTWGIWLQRNAIIFNNDYGTVSHVVDFIINMCKAFDEAQIA

SEQ ID NO: 1674 - protein, 120 aa, Oceanobacillus iheyensis
MTNEEMISAIKEMSVLELNDLVKAIEEEFGVTAAAPVAAAGAAGGAVEEEKTEFDVVLTSAGASKIKVVKAVREITGLGLKDAKDLVDNAPKPIKEGVSKEEAEEVQGKLEEAGASVEVK

SEQ ID NO: 1675 - protein, 425 aa, Oceanobacillus iheyensis
MFKFNEEKGQLKCSFCGKSQEQVRKLVAGPGVYICDECIDLCTEIVEEELGTEEDMEMNEIPKPKEICDILDDYVIGQDKAKKNLSVAVYNHYKRVNSGKGNDEVEIAKSNIAMIGPTGSGKTLLAQTLARIINVPFAMADATSLTEAGYVGEDVENILLKLIQAADYDVEKAEKGIIYIDEIDKVARKSENPSITRDVSGEGVQQALLKILEGTVASVPPQGGRKHPHQEFIQIDTTNILFIVGGAFDGIDQVIKRRLGKKVIGFGSHEKQEDLDTGQLLSKVLPEDLLRYGLIPEFIGRIPVIGSLTPLDEEALIEILTKPKNALVKQYQKLFEIDHVELEFEEEALQEIAKKAIERKTGARGLRSIIEGIIVDVMFDIPSREDVDRCIITKETVSDDDGSPKLVFRDGTVKLGNEKLPKESA

SEQ ID NO: 1676 - protein, 586 aa, Oceanobacillus iheyensis
MRNTKIVCTIGPASESIEKLEQLIEAGMNVARLNFSHGDYAEHGARIENIRKAAKNKNKTVAILLDTKGPEIRTGSFKEGRADLMQGNPVTIAMDEVEGTAEKFSVTYQGLINDVHEGSKILLDDGLIELEVKSIDKSKGEIETIALNSGEIKNKKGVNVPNVSVNLPGITEKDTNDIIFGIEQGVDFIAASFVRRASDILEIKEVLDQHQAQYIKIIPKIENQEGVDNIDSILEVSDGLMVARGDLGVEIPAEDVPLVQKKLIKQCNNAGKPVITATQMLDSMQRNPRPTRAEASDVANAIFDGTDAIMLSGETAAGTYPVESVQTMSNIALKAESALDHKQMLEERSQYVDMTITEAISQSVTHTASNLNVDTIITPTESGHTARMISKYRPKASILAVTFNEVVNRQLSLVWGVHAVLGKPATSTDEMLEIAVDKGLNTGICSRGSRVIITAGVPVGESGTTNLLKVHVIGDVIAKGQGIGRRSAYGHAVFAKTNKEALEKVQDGDILVTYATEKEMMPAIEKASAIITEEGGLTSHAAVVGLSLGIPVIVGVDNVFEILQDGQDITVDGNRGDIYAGHAGVL

SEQ ID NO: 1677 - protein, 375 aa, Populus x
MGRAPCCEKNGLKRGPWTPDEDQKLIGYIQKHGYGNWRTLPKNAELQRCGKSCRLRWTNYLRPDIKRGRFSFEEEETIIQLHGILGNKWSAIAARLPGRTDNEIKNYWNTHIRKRLLRMGIDPVTHSPRLDLLDLSSILNSPLYDSSRMNMSRILGVQPLGDPELLRLATSLLSSQRDQTQDFAIPNGHQENHLSSPQVHQNQNQSIIHQANQFQPAGQEMPACTALTTTPCVTFSNEAQQMDPNGDQYHLSTITTFSSPNSQVSTHDQWQSNRMGSNLSEDYYVPAVSSYNSADNCRGTDLVDPSSEASTFISNNSNQTFGFASVLSTPSSSPAPLNSNSTYINCSSTEDERDSYCSNFLKFEIPDILDVSNFM

SEQ ID NO: 1678 - protein, 567 aa, Zymomonas mobilis
SYTVGTYLAERLVQIGLKHHFAVAGDYNLVLLDNLLLNKNMEQVYCCNELNCGFSAEGYARAKGAAAAVVTYSVGALSAFDAIGGAYAENLPVILISGAPNNNDHAAGHVLHHALGKTDYHYQLEMAKNITAAAEAIYTPEEAPAKIDHVIKTALREKKPVYLEIACNIASMPCAAPGPASALFNDEASDEASLNAAVEETLKFIANRDKVAVLVGSKLRAAGAEEAAVKFADALGGAVATMAAAKSFFPEENPHYIGTSWGEVSYPGVEKTMKEADAVIALAPVFNDYSTTGWTDIPDPKKLVLAEPRSVVVNGIRFPSVHLKDYLTRLAQKVSKKTGALDFFKSLNAGELKKAAPADPSAPLVNAEIARQVEALLTPNTTVIAETGDSWFNAQRMKLPNGARVEYEMQWGHIGWSVPAAFGYAVGAPERRNILMVGDGSFQLTAQEVAQMVRLKLPVIIFLINNYGYTIEVMIHDGPYNNIKNWDYAGLMEVFNGNGGYDSGAGKGLKAKTGGELAEAIKVALANTDGPTLIECFIGREDCTEELVKWGKRVAAANSRKPVNKLL

SEQ ID NO: 1679 - protein, 294 aa, Allium cepa
MDQYEKVEKIGEGTYGVVYKARDRLTNETIALKKIRLEQEDEGVPSTAIREISLLKEMQHANIVRLQDVVHSEKRIYLVFEYLDLDLKKHMDSCPDFAKDSRLAKTFLYQLLRGIAYCHSHRVLHRDLKPQNLLIDRRTNSLKLADFGLARAFGIPVRTFTHEVVTLWYRAPEILLGARQYSTPVDIWSVGCIFAEMVNQRPLFPGDSEIDELFKIFRIMGTPNEDTWPGVTSLPDFKSAFPKWPAKDLATIVPKLDSAGIDLLYKMLHLEPSKRITARKALEHEYFRDLGTIP

SEQ ID NO: 1680 - protein, 585 aa, Bacillus subtilis
MRKTKIVCTIGPASESIEMLTKLMESGMNVARLNFSHGDFEEHGARIKNIREASKKLGKNVGILLDTKGPEIRTHTMENGGIELETGKELIISMDEVVGTTDKISVTYEGLVHDVEQGSTILLDDGLIGLEVLDVDAAKREIKTKVLNNGTLKNKKGVNVPGVSVNLPGITEKDARDIVFGIEQGVDFIAPSFIRRSTDVLEIRELLEEHNAQDIQIIPKIENQEGVDNIDAILEVSDGLMVARGDLGVEIPAEEVPLVQKELIKKCNALGKPVITATQMLDSMQRNPRPTRAEASDVANAIFDGTDAIMLSGETAAGSYPVEAVQTMHNIASRSEEALNYKEILSKRRDQVGMTITDAIGQSVAHTAINLNAAAIVTPTESGHTARMIAKYRPQAPIVAVTVNDSISRKLALVSGVFAESGQNASSTDEMLEDAVQKSLNSGIVKHGDLIVITAGTVGESGTTNLMKVHTVGDIIAKGQGIGRKSAYGPVVVAQNAKEAEQKMTDGAVLVTKSTDRDMIASLEKASALITEEGGLTSHAAVVGLSLGIPVIVGLENATSILTDGQDITVDASRGAVYQGRASVL

SEQ ID NO: 1681 - protein, 427 aa, Nitrosomonas europaea
MMSEKTNDEKLLYCSFCGKSQREVRKLIAGPSVFICDECIDLCNDIIREEIQVDETAKLAKTSLPTPHEIRETLDQYVIGQESAKKILSVAVYNHYKRLKNLSKVNNGDDVELSKSNILLIGPTGSGKTLLAQTLARLLDVPFVIADATTLTEAGYVGEDVENIIQKLLQKCNHDVEKAQRGIVYIDEIDKISRKSDNPSITRDVSGEGVQQALLKLIEGTTALVPPQGGRKHPNQEFIQIDTTNILFICGGAFDGIDKIIRGRSEKSGIGFGADVINQNDRKELNKILKDIEPEDLIKYGLIPEFVGRLPVVATLSELNEAALIQILVEPKNALIKQYNKLFSMEGGVELEFREQALVAIARKALSRKTGARGLRSILEETLLDIMYDLPSIENVSKVVIESGSNHDELQPIVIYAEKPKLARSSK

SEQ ID NO: 1682 - protein, 334 aa, Nitrosomonas europaea
MHTGTTLTQFIIEEQRHIAGASGDFTALLNDIVTAIKTISNAVNKGALIGVMGALDTENVQGETQKKLDVITNEIMIRNNEWAGHLSGMASEEMDDVYSIPSPYPLGKYLLVFDPLDGSSNVDLNISVGTIFSILRSPVPSRAASMEDFLQPGVKQVCAGYALYGSSTMLVLTTGHGVNGFTLDRDIGEFVLTHPNMRIPADTREFAINASNQRFWEAPVQRYVAECLAGSTGPRGRDFNMRWVASMVAEVHRILTRGGIFMYPRDTKDPSKPGRLRLMYEANPMSFIVEQAGGLSTTGYERILDVVPQDLHQRVPVILGSKNEVEVVLEYHNA

SEQ ID NO: 1683 - protein, 343 aa, Nitrosomonas europaea
MDIFIQYGMAAAIQAIRDAGISDVSGFNADRIGVNIGSGIGGLPMIENTDAAYHAGGPRKISPFFIPSTIINMVAGNLSIMFGYKGPNLAIVTACTTATHCIGSSARMIEYGDADIMVCGGTESCVTPLAVGGFASARALSSNNDDPAAASRPWDLKRDGFVLGEGAGILVLEEMEHARKRGAKIYAELAGFGMSADAHHMTAPCEDGEGAARCMTNALSDAQMHADELHYINAHGTSTPLGDIAETIAVKRCFGEHAKDLAVSSTKSMTGHLLGAAGGVEAIFSALAVYHQIAPPTINLDDPDPACDLDYVPNNAREMKIDAALSNSFGFGGTNGTLVFRKI

SEQ ID NO: 1684 - protein, 504 aa, Rhodobacter sphaeroides
MGAPGPSSAAPGRAAAEPCPWQRRLRGFDAPAAGSSGTAGCGGGGPVGRRTGAGRWLRLLRRAVGACKTATHMGPTTGWQRSHGMRRVVVTGLGMVTPLACGVEETWKRLLAGQSGAGPIQRFDTSNVTTQYACEIPVGDGSDGTFNADDWMEPKDRRKVDDFILYAMAAATQAVKDSGWEPQSEEDRCRTGVMIGSGIGGLSAIADTAVLIKEKGPKRVSPFFIPSALINLASGQVSIRFGYKGPNHAVVTACSTGAHAIGDAARLIQLGDADVMLAGGAESPISEIGIAGFNACKALSTKRGNEPEAASRPWDADRDGFVMGEGAGVVVLEEYEHARARGAKIYAEVLGYGLSGDAYHITAPSEDGDGGFRSMTMALKRAGLEPSAVDYINAHGTSTMADVIELGAVERLLGEAAAAATMSSTKSSIGHLLGAAGAVEAIFCVLAIRDQVAPPTLNLDNPAVEARIDLAPKAARPRKIDVALSNSFGFGGTNASLVLGRVTS

SEQ ID NO: 1685 - protein, 125 aa, Rhodobacter sphaeroides
MADLNKLAEDIVGLTLLEAQELKTILKDKYGIEPAAGGAVMMAGPAAGAAAPAEEEKTEFDVVLTDAGANKINVIKEVRAITGLGLKEAKDLVEAGGKVKEAVAKADAEAMKKKLEEAGAKVELK

SEQ ID NO: 1686 - protein, 495 aa, Rhodobacter sphaeroides
MKELGREDDPGSGPARKREETRKGMMADAPLILWFRRDLRLADNPMLAEAAATGRPLIPLFILDPETEALGAAPKWRLGLGVEAFARALEGLGSRLVLRRGPALAVLEALVAETGAAGVHWSRLWEPDWRARDEGVKAGLRQAGIEAASHAGHTIFEPREVETGQGGFYRVYTPFWKAVKDRPVAASSPPPARLLSPAEWPVSERLACWDLGRAMHRGAAVVAPHLAVGEAAAAERLTRFLSGPLDRYAAERDRPDAPVTSRLSENLTYGEISARSLWHAGMRARAEGRAGAEKFLQELAWREFGWHLLYHTPEIARRNWRGDWDAFPWRGDNPDAERWRRGMTGEPFVDAAMRELFVTGTMHNRARLIAGSYLTKHLLTDWRVGQAWFEDCLIDWDPASNALGWQWVAGSGPDASPYFRIFNPATQAEKFDPESAYRQRFLAEIARRPGPEALAFFEAVPRSWGLRPDRCYPRPVVGLAEGRERALAAYGRRNN

SEQ ID NO: 1687 - protein, 421 aa, Rhodobacter sphaeroides
MANNTGSDSKNTLYCSFCGKSQHEVRKLIAGPTVFICDECVELCMDIIREETKSTGLKSADGVPTPREICKVLDDYVIGQMHAKRVLSVAVHNHYKRLNHSSKTDIELSKSNILLIGPTGCGKTLLAQTLARILDVPFTMADATTLTEAGYVGEDVENIILKLLQASEYNVERVQRGIVYIDEVDKITRKSDNPSITRDVSGEGVQQALLKIMEGTVASVPPQGGRKHPQQEFLQVDTTNILFICGGAFAGLEKIIAQRGKGSGIGFGAEVKDPDARGVGELFKELEPEDLPKFGLIPEFVGRLPVIATLTDLDEAALVTILTEPKNALVKQYQRLFEIEGVKLTFTADALTAIAKRAIKRKTGARGLRSIMEDILLDTMFELPGLEGVEEVVVNEEAVNSGAKPLLIYTEVTKKKDATAS

SEQ ID NO: 1688 - protein, 590 aa, Rhodobacter sphaeroides
MAGADAQPPCQVPPHLHPRRGRRPRLPQGRKLLARHAGGGPARGGQPRAALHRGRARRVGAASRPPAGVARRGPSHRGRGRRHRRASRGAQARAPDAADRRAAGARPRRRFRRALRGRGLEGRPPRRRRGAGRRHRGLRGRRHGGARPLVSAGAGDMARRQPQRGLRAGPARGGLARFGPDPRPPFRPAWRDAGPALGGARLPSRGLGPRPRRGAGGSARPGSGGAAGPCRLGRGLGRNRGHRPDGGARRTPRRAGGLMRPPAFWFTPPDSPALAARLLAPLGQAYAAATARRLRAPGHRAGVPVICIGNLNAGGTGKTPTAIALMQRLAARGIEAHVVSRGYGGRLEGPVEVDARRHRAADVGDEPLLLAAFGRAWVARDRAAGVRAAEAAGAQAILLDDGFQNPSVVKDLSLIVVDAAVGFGNGRCLPAGPLREPVEAGLARADLLLSIGGPEAQRRFATDWPALPVPRLTGRLATLQMGMDWQGARVLAFAGIGRPEKFFASLRAEGAELLRAEALDDHQPLGEALMKRLEIEAMALGAQLVTTEKDAVRLPPSFRQKVLTLPVRLEFDDATALDAALDRLGLAARS

SEQ ID NO: 1689 - protein, 703 aa, Rhodobacter sphaeroides
MGALSRHRRDAGRHRRAAARRARGRESAAGSGATGRPARGGSGSRDRAAGRLDRRPLRAASLSCRGSSRGRAPPRLGRTRPRGPRAVPERAAQGSGSAHGADARRPPRGQGGCGGAALPAGARTRARCAGDDGNGFEGDGRRLGAAARQDGGGTAAGLGQQGHGARGLSDGAALRRAEARCDRRRRDRRGDVPGGQCLRRPLGADLRDRGADAGPGAARLAAGAPRPRGGARRMSRLVVVSNRVPLPDENGNPPPGGLAVAVHAALRKNGGIWMGWSGRSTGEEEPQGLTTLEQDKISYVLTDLSQADLDEYYNGFANRVLWPIFHCRLDLAEYARQEMAGYFRVNRLFADRLVPMLEPDDVIWVHDYHLIPLAQELRKRGVRNRIGFFLHIPWPPADILTALPVYEIIMRGLAAYDLVGFQTDYDLDNFVGCLRREGWGDWSTPGWLRAFDKEVAAAAFPIGIETGDFARLAAKTDGLDLVTDMQQSLHGSSLIIGVDRLDYSKGIAARIDAFERYLMRNPDQAGKVTLLQVAPHSRSDVPEYLEMQGQVESHCGRVNGAHGTIEWVPIRYVNQSLTRPVLAGLYRLAKVGLVTPLRDGMNLVAKEYVASQDPADPGVLILSRFAGAARELDGAIFINPYDTEQTAGAIGRALSMPLDERIARWRRMMDHLESHDVLWWCRTFLAALNEAPEDNGALTRESD

SEQ ID NO: 1690 - protein, 858 aa, Rhodobacter sphaeroides
MPPPCPRPPASPRRRLRWCGHEGRRRLSRPRHLHQGRTGLSRPAPSRQGRAVRPVRCPAPGGGAGDAGRSRRRSELFRGAPHAGRQCLGADLCRGLRRFPVAHGRRGGGRHRQFDGLVYGAGLRRRPFGRRRLPGRQHDGHADAGGADRRPDRPSGHGRGLAARPCPPRATAGSGGRDRRPPGAHPRPLHRARRDARAGGQCRRSGRFRGRSAARTGPLPDAPCQSRGLPHRPSGAGRRARTGGAARGAVRSAAAAAHRRARRRLVAESHRRGGAPGLYARPSGHGALRFHPRHRGRRAGIRARRLRRTRPRHHAGRGRGAELDPRRLARDEGPQGFPDPSGREPPADRTGARGPARARHRRTQMTDLFHALGIADAATGGSLSVLSPIDGAEIGRVRPTDPAAMPGLIARAQEAFRHWREVPAPRRGELVRLFGEELRAAKAELGALVTLEAGKITSEGLGEVQEMIDICDFAVGLSRQLYGLTIASERPGHRMMETWHPMGPCAVISAFNFPVAVWSWNAALALVCGNPVIWKPSEKTPLTALASMAIFGRALARFGDAPEGLAQLVMGGPEIGEALVLSPEVPIVSATGSTRMGRIVGPKVAARFGRPILELGGNNAMIVAPSADLDMAVRAIVFSAVGTAGQRCTSLRRLIVHHSVREELVGRLVKAYASLKIGDPRADGTLVGPLIDAASRDRMVAALDRARAKGGTVHGGKPVEGVPGGAYIQPALVEMPAQTGVVCEETFAPILYVMGYETLDEAIALQNAVPQGLSSCIFTLNLREAEAFVSAAGSDCGIANVNIGPSGAEIGGAFGGEKDTGGGRESGSDAWRGYMRRQTNTINWSAALPLAQGVRFDI

SEQ ID NO: 1691 - protein, 418 aa, Rhodobacter sphaeroides
MEERHAEGFLQVPDLAVDCRRRQTEARGPARQRGAARHRHEGAQLLQGDRIEPHHFQIPEQNFYLIKFHKIRSAASWAHVAEEMPVKPFPTHPDAIPAELQDVMDRLGSVAIEVANRIARGGIDEDLAGLCGTNTDGDGQKALDVIADDAFRVALEGSAVRFYASEEQDTAVTLNEAGTLALAIDPLDGSSNIDTNLSVGTIFAIWPAAATAEASFLRLGSELIAAGYVIYGPQVCMMVSFGKGTQKYVLDPGSRSFVLVDRAVKVPPSSTEFAINASNYRHWPKPIRAYIDDCVAGTEGPRGRNFNMRWLASLVAETHRILARGGVFLYPRDSRKGYEQGRLRYLYECAPIAFVITQAGGGATDGENPILGQTPSRLHARTPFVFGSAEKVARITAYHDLPEQETSALFGNRGLFRS

SEQ ID NO: 1692 - protein, 686 aa, Rhodobacter sphaeroides
MTLAAPNPPPYIRPVAGRGATPDGRNFGIGDRTPTVGPDPHNIAAREVHNMAKVIGIDLGTTNSCVAIMDGAQPRVIENSEGARTTPSIVGFTDSERLVGQPAKRQAVTNPSNTVFAVKRLIGRRVGDAEVEKDKKLVPYSIVNGGNGDAWVEVRGEKYSPSQISAFILQKMKETAEAYLGESVTQAVITVPAYFNDAQRQATKDAGKIAGLEVLRIINEPTAAALAYGLDKKDTKTIAVYDLGGGTFDITILEIDDGLFEVKSTNGDTFLGGEDFDMRIVNYLADEFKKEHGVDLTLDKMALQRLKEAAEKAKIELSSSQQTEINQPFISMDRNTGQPLHMVMKLTRAKLESLVGDLIKKSLKPCEAALKDAGVSKSDIDEVVLVGGMTRMPRVVEEVTKFFGKEPHKGVNPDEVVALGAAIQAGVLQGDVKDVVLLDVTPLSLGIETLGGVFTRLIDRNTTIPTKKSQVFSTAEDNQNAVTIRVFQGEREMAADNKLLGQFNLEDIPPAPRGMPQIEVTFDIDANGIVSVSAKDKGTGKSQNITIQASGGLSDEDIEKMVRDAEANAEADKKRRELVETKNQGESLLHSTRKSIEEHGDKVDPSTVEAIELAMGALEEALKSEDAGKIKGGIQNLTEAAMRLGEAIYKASQAEGGATPDEEGPRSVDDDIVDADFEDLGENKRK

SEQ ID NO: 1693 - protein, 369 aa, Rhodopseudomonas palustris
MTDRLTSSAQRSSRNHLVALRCGGVIMDQGQTLSVLLDSYAVDPQKKAVAAAVGAIAAGSIEISELIGQGALAGITGAAHGGSNADGDVQKDLDVKAEQIIVKSLKDVPYAALASEESDTLLDGDPNAPISIAYDPLDGSSNIDTNMTVGTIFSIIPNQPGVKPFTAAGSCQIAAGFVVYGPQTSLVLTLGDGVNIFTLDRKAKVYRLIRERVKVPADTAEYAVNASNHRHWEQPIRDFVDECIAGADGPRAKDFNMRWIGSLVAEVYRILTRGGVFLYPGDNRPGYGNGRLRLLYETHPMSFVMEQAGGAASTGRERVLDLTAKTIHQRSPLIMGSIDKVKRIELLHTDPSAASRSAPLFARRGLFRV

SEQ ID NO: 1694 - protein, 634 aa, Rhodopseudomonas palustris
MNTMGKVIGIDLGTTNSCVAVMDGKSAKVIENAEGMRTTPSIVAITDDGERLVGQPAKRQAVTNPERTFFAVKRLIGRRYDDPMVEKDKGLVPYKIVKASNGDAWVEADGKTYSPSQVSAFILQKMKETAEAHLGQKVDQAVITVPAYFNDAQRQATKDAGKIAGLEVLRIINEPTAAALAYGLDKAKTGTIAVYDLGGGTFDVSILEIGDGVFEVKSTNGDTFLGGEDFDMRLVNYLADEFQKEQGIDLRKDKLALQRLKEAAEKAKIELSSTTQTEINLPFITADQSGPKHLTMKLTRAKFEALVDDLVQKTIEPCRKALKDAGLTAGEISEVVLVGGMTRMPKVQEVVKQLFGKEPHKGVNPDEVVAIGAAIQAGVLQGDVKDVLLLDVTPLSLGIETLGGVFTRIIDRNTTIPTKKSQVFSTAEDNQNAVTIRVFQGEREMAADNKMLGQFDLMGIPPAPRGMPQIEVTFDIDANGIVNVSAKDKATGKEQQIRIQASGGLSDSEIDKMVKDAEANAAEDKKRREAVDAKNHADALVHSTEKALAEHGSKVDESERRSIEDALSDLREALKGDDAEAIKAKSNTLAQASMKLGEAMYKQAEAAGGAQQAGKDDVVDAEFTEVDDDKKKSA

SEQ ID NO: 1695 - protein, 424 aa, Rhodopseudomonas palustris
MLEMRRVVVTGLGMVSPLGCGVEPTWSRVLAGESGARKIDTFDVSDLASQIACVIPRGDGTNGTFNPDQWMEPKDQRKVDDFIVYAMAAARQALDDAGWHPSTEEERCASGVLIGSGIGGLQGIAETALLLEQRGPRRISPFFIPGRLINLASGYVSIEFGLKGPNHSVVTACSTGAHAIGDASRLIALGDADVMVAGGTESPISRLAMAGFAAARALSTGFNDAPTKASRPYDKDRDGFVMGEGAGVVVLEEYEHAKARGARIYAEVIGYGLSGDAYHITAPSSDGDGAFRCMSAAIKRGGIAVSDIDYINAHGTSTPLGDEIELGAAQRLLGNAASRVSMSSTKSSIGHLLGAAGAVEAIFCVLAIRDNVAPPTINLDSPSVETAIDLVPWKPRAREINVALSNSFGFGGTNASLVLQRVPN

SEQ ID NO: 1696 - protein, 483 aa, Rhodopseudomonas palustris
MLTPASSRPLIVWFRDDLRLADHPALHAAAQSGAPVLCVYVLDEVSDDVRALGGAVRWWLAQSLRALESELRALGGALILRRGPTAAVLAELAQQHDAAAVHWNEIEIAAHRAVADALADALTVAGIAYHRHRGDTLVEPSAIRSKDGRGMRVFTPFWRRVLSLGDPPQPLPRPTTLRPAPAVPTEQLSDWQLEPTAPDWAGGLRQTWTPGEAAAQTRLAAFLAMQPGYAEGRDYPDRHITSGLSPHLRFGEISPRQVWYAARFAAAERPAIAPDIDKFLSEVGWREFCRHLLFDHPDLASRNLQPAFDAFPWQSDDAVLTAWQRGRTGYPIVDAGMRELWHSGVMHNRVRMVVGSFLVKHLLIDWRLGEQWFWDTLVDADPGSNPGNWQWVAGCGADAAPYFRVFNPVLQSEKFDAGGAYIRRWVPELARLPNDLIHQPWTATPLELAAAGIKLGGNYPGPIVDHKTGRQRALSAYAELRQR

SEQ ID NO: 1697 - protein, 125 aa, Rhodopseudomonas palustris
MADLQKIVDDLSSLTVLEAAELAKLLEEKWGVSAAAAVAVAAAPGAGGAAAPAEEKTEFTVVLASAGDKKIEVIKEVRAITGLGLKEAKDLVEGAPKPLKEGVNKEEAEKVKAQLEKAGAKVELK

SEQ ID NO: 1698 - protein, 517 aa, Rhodospirillum rubrum
MKETAEAHLGEPVTQAVITVPAYFNDSQRQATKDAGKIAGLEVLRIINEPTAAALAYGMDKKNTGTIAVFDLGGGTFDVSVLEIGDGVFEVKSTNGDTFLGGEDFDARIIDYLASEFKKEQGIDLRTDRLALQRLKEAAEKAKIELSSSMQTEVNLPFITADQAGPKHLNIKLTRAKLEALVDDLVQRTVEPCRKALADAGIKASEIDEVILVGGMTRMPKVQQVVKDFFGREPHKGVNPDEVVAMGAAIQGGVLKGDVKDVLLLDVTPLSLGIETLGGVFTRLIDRNTTIPTRKSQTFSTAEDSQTAVTIRVFQGEREMAADNKMLGQFDLVGLPSAPRGVPQIEVTFDIDANGIVNVSAKDKATGKEQAIRIQASGGLSDNDIERMVKEAELNAEADRKRKEAVEARNHADGLIHATEKNLKEYGDKIPAEDKAKVEGDLTALKAVLDSEDAESIKAKTDALMQSAMKLGEAAYSAGQSAEGAPHAAGAEASAQSRTDDGVVDADFEEVDEKKGH

SEQ ID NO: 1699 - protein, 123 aa, Rhodospirillum rubrum
MADLAKLVDELSALTVLEAAELSKLLEEKWGVSAAAPVAVAAVAAEAAAPVEEKTEFDVILVDAGDKKINVIKEVRAITNLGLKEAKDLVEGAPKPVKEAVSKDEAASIKKKLEEAGAKVELK

SEQ ID NO: 1700 - protein, 478 aa, Rhodospirillum rubrum
MTIPVLVWFRDDLRLADNPALCAALDSGAPVIPFYLLDDSTSDGHRPLGGATRWWLGRSLTSLAESIAQRGGRLVLRRGEALSAVPELAAETDAAALFANRLYGMDSLRDDDLFMVLRVAGLTVRLFDSGLLHRPEAVTTKTGRPFRVFTPFWKTLSATLDPGLPLAAPDSFPPVDDPPPASDSLADWSLEPTTPDWAGGLRDTWQPGEAGAQARLEAFFNGPVADYASGRDRPDKPLTSKLSPHLRFGEISPRQVWTAARHHPPGGGMDAFLRELGWREFCHHLLFQAPTMAEEPLKAEFLAFPWTEAKEIGPALAAWQSGETGYPIVDAGMRELWHTGWMHNRVRMIAASFLIKDLLIPWQHGERWFWDTLVDACPANNAAGWQWVAGCGADAAPFFRIFNPVTQGERFDPEGAYVRRWLPELADLPSSLIHRPWEAPPLILRQAGVTLGKTYPPPLIDHAHARVRALEALAVVNR

SEQ ID NO: 1701 - protein, 506 aa, Rhodospirillum rubrum
MASAYAVAVHDLLVHLGVPESAFTGGDITVHSPIDGGTIGAVHATPLAEVAPLIERAHRAHLAWRQIPGPRRGELVRLFGEELRAHKADLGRLVTLENGKILSEGLGEVQEMIDICDFAVGLSRQLHGLTIASERPGHAMRETWHPLGVVGVISAFNFPVAVWAWNSALALVCGDAVVWKPSEITPLTALACGALLAKAAQRFGDDYPTDLSVLLIGASALGEALVDHPQVPLISATGSTRMGRLVAPKVAARLGRTILELGGNNAGIVCPSADLDLAVRAIAFAAIGTAGQRCTTLRRVIVHESIAADLIGRLAAAYASIRVGNPLEAGTLVGPLIHGAAQEAMETALARAKADGGIVHGGERVMLPGSEGGCYVRPALVEMPAQTAVVAEETFAPILYAVTYRSLEEAIALQNAVPQGLSSSIFTNDLREAETFLSAAGSDCGIANVNIGPSGAEIGGAFGGEKDTGGGRESGSDAWKGYMRRATNTVNYSGALPLAQGVSFEL

SEQ ID NO: 1702 - protein, 182 aa, Rhodospirillum rubrum
MRRVVVTGLGMVTPLGCGVKTNWTSLVQGKSGIRPIQKFDVSDMPARVAGQIPTAADGPHGFDPDTVVSSKDRRRMDDFIVYGLAAAKEAVEDSGWMPEDEESRERTGVMIGSGIGGLTSIAETALILKEHGPRKVSPFFIPSALINLVSGHVSIRYGFKGPNHAVVTACSTGAHAIVTPAG

SEQ ID NO: 1703 - protein, 422 aa, Rhodospirillum rubrum
MSKSSGGDSKNTLYCSFCGKSQHEVRKLIAGPTVFICDECVELCMDIIREEHKTSLVKSRDGVPSPKDILKVLDDYVIGQQHAKKVLSVAVHNHYKRLSQAGKNSDVELAKSNILLIGPTGCGKTLLAQTLARILDVPFTMADATTLTEAGYVGEDVENIILKLLQASDYNVERAQRGIVYIDEIDKISRKSDNPSITRDVSGEGVQQALLKIMEGTVASVPPQGGRKHPQQEFLQVDTTNILFICGGAFAGLDRIISARGKGSSIGFGADVRDPEARRTGEVLRAVEPEDLLKYGLIPEFVGRLPVLATLDDLDEDALVDILTTPKNALVKQYQRLFEMESTQLSFKEDALRCIALKAIARKTGARGLRSIMEGILLDTMFDLPGMEGVEEVVVNKEVVEGRAKPLFIYSDQRTSADGASA

SEQ ID NO: 1704 - protein, 369 aa, Rhodospirillum rubrum
MSVLSQDRPRERPPMLATDRTTLAQFLVEECRGRAGDDSELLGLLLDVAQACKTISKMTAMGSLAGVHGYNGDVNPQGENQARLDLMSNQAFVRATERTGHAAGLASEEMEEVLGFPESYARGTLLLVFDPLDGSSNIDINGTVGSIFSILPMPRPGEAPQTADFLQSGRQQVAAGYALYGPSTMFVLTIGSGVHGFTLDPLLGDFILTHPSMTVIPESGEFAINSSNSRFWEPPIRAYVDELLAGRSGPRSKDYNMRWIAALVADVHRILLRGGIYLYPRDTKTPDLAGRLRLLYEAAPVAFLMEQAGGRCTTGTRTMLDLVPGSLHERVPLIFGSAVEVERVETLYREPQRREFATPLFNQRGLFRD

SEQ ID NO: 1705 - protein, 159 aa, Rhodospirillum rubrum
SSIGFGADVRDPEARRTGEVLRAVEPEDLLKYGLIPEFVGRLPVLATLDDLDEDALVDILTTPKNALVKQYQRLFEMESTQLSFKEDALRCIALKAIARKTGARGLRSIMEGILLDTMFDLPGMEGVEEVVVNKEVVEGRAKPLFIYSDQRTSADGASA

SEQ ID NO: 1706 - protein, 478 aa, Chloroflexus aurantiacus
MRRYMRRTKIVATLGPATSTPERIAGLIRAGMNVARLNFSHGTHAEHAARIAMVRRAAAEAGRHVAILQDLQGPKIRTGPLENGQPVELVAGQRFVITTEPIVGDAHRVSTTYRALPLDVRPRDRILLSDGLIELVVTGHTDTEVETEVVHGGRLREHQGINLPGVRVSAPAATEKDLADLAFGLEQGVDYVALSFVRRASDVREVKEFIRRAGKQTPVIAKIERPEALDVLPEILAEADGIMVARGDLGVEMPPERVPIVQKQIIAAANQALLPVITATQMLESMIHNPRPTRAEASDVANAIIDGTDAVMLSGETAAGAYPIEAVQMMALIADAVEASYTGGQHSTTPRWSIAPAQSTPRAIAAAACTIANSLPVRFIVVLTQSGASARLVSHYRPEVPILAFCPSEETARRTSLYWGVTPIVIEARDRLDELEQQIVRMMRETGMVRKGDLIVLSGGHPVYRYGPTNFLKVITIE

SEQ ID NO: 1707 - protein, 132 aa, Chloroflexus aurantiacus
MSKIDSIIEMIEGLNVLELVELKKKMEEKWGVTAAAPVMAMGAAMPVAAAGDGAAAAAPVEEKTEFDVILKEAGPNKIQVIKVVRELTSLGLKEAKDLVEGAPKPVREGVSKEEAEAAKAKLTEAGAVVEIK

SEQ ID NO: 1708 - protein, 338 aa, Ralstonia metallidurans
MTRISLTRYLVEEQRKHNTIEPELRLLIEVVARACKAISNAVSKGALAGVLGSAGTGNVQGETQQKLDVIANEVLLDANEWGGHLAAMASEEMDSFYEIPNRYPKGEYLLLFDPLDGSSNIDVNVSIGTIFSVLHMHKPGQTVTEHDFMQPGTQQVAAGYAVYGPQTTLVLTVGNGVHMFTLDREAGSFVLTQSDVMIPEDTKEFAINMSNMRHWAPPVRRYIDECLAGDEGPRGKNFNMRWIASMVADVHRILTRGGVFMYPWDKREPEKPGKLRLMYEANPMAFLVEQAGGAATNGQQRILDVEPTKLHQRVSVILGSKNEVERVTRYHQEDAAKA

SEQ ID NO: 1709 - protein, 410 aa, Ralstonia metallidurans
MSRRRVVVTGLGLVSPVGNTVAEGWANLVAGKSGIATITKFDHSPFAVHFAGEVKGFNAEDYIPAKEARNMDTFIHFGIAAGSQALKDSGLEVTEANAERIGVLVGSGIGGLPMIEDTQMTLAERGPRRISPFFVPGSIINMISGHLSIIHGLKGPNLAAVTACTTGLHSIGLAARLIQAGDCDAMLAGGAESTVSPLGIGGFAAARALSTRNDDPAAASRPWDKDRDGFVLGEGAGVMMLEEYESAKARGARIYAELIGFGMSGDAFHMTAPNTDGPRRCMVAAIKDAGINPDEVQYLNAHGTSTPLGDKNETDAVKLAFGDHAYKMVVNSTKSMTGHLLGGAGGLESVFTVLAIHNQISPPTINIFNQDPECDLDYVANTARDMKIDVAVKNNFGFGGTNGTLVFRRV

SEQ ID NO: 1710 - protein, 425 aa, Ralstonia metallidurans
MADKKGSSSEKLLYCSFCGKSQHEVKKLIAGPSVFICDECIDLCNEIIRDEASATDKDATAATRSDLPTPHEIRESLDQYVIGQDQAKKILAVAVYNHYKRLKHLGKKDDVELSKSNILLIGPTGSGKTLLAQTLARLLNVPFVIADATTLTEAGYVGEDVENIIQKLLQNCNYEVEKAQRGIVYIDEIDKISRKSDNPSITRDVSGEGVQQALLKLIEGTMASVPPQGGRKHPNQDFLQVDTTNILFICGGAFDGLEKVIMQRSDKTGIGFAAQVQSKEEREVSEVLPQTEPEDLIKFGLIPELIGRLPVVATLAKLDEAALMQILIEPKNALVKQYQKLLAMEGVELEIRPAALSAIARKAIRRKTGARGLRSILEQSLMDVMYDLPNYKGVQKVVIDENTITGDAAPLLVYEEQQPKVAGSN

SEQ ID NO: 1711 - protein, 74 aa, Escherichia coli
AAEEKTEFDVILKAAGANKVAVIKAVRGATGLGLKEAKDLVESAPAALKEGVSKDDAEALKKALEEAGAEVEVK

SEQ ID NO: 1712 - protein, 643 aa, Ralstonia metallidurans
MGKIIGIDLGTTNSCVSILEGNTPKVIENSEGARTTPSIIAYMEDGEILVGAPAKRQAVTNPRNTLYAVKRLIGRKFEEKEVQKDIGLMPYAIVKADNGDAWVGVRDQKLAPPQVSAEVLRKMKKTAEDYLGEPVTEAVITVPAYFNDSQRQATKDAGRIAGLDVKRIINEPTAAALAFGMDKNEKGDRKIAVYDLGGGTFDISIIEIADVDGEKQFEVLSTNGDTFLGGEDFDQRIIDYIIGEFKKEQGVDLSKDVLALQRLKEAAEKAKIELSSSQQTEINLPYITADASGPKHLNLKITRAKLEALVEELITRTIEPCRTAIKDAGVKVSDIDDVILVGGMTRMPKVQEQVREFFGKEARKDVNPDEAVAVGAAIQGSVLSGDRTDVLLLDVTPLSLGIETLGGVMTKMINKNTTIPTKHAQVFSTADDNQPAVTIKVYQGEREMATGNKMLGEFNLEGIAPAPRGTPQIEVSFDIDANGILHVGAKDKATGKENRITIKANSGLSEDEIQRMVKDAEANAEEDKRARELADARNQADALIHSTRKALGEYGEKLEAGEKEKIEAAIKDLEDAARGGDKAEIDAKVNALSEASQKLGEKVYADMQAQAGEGAAAGAGAAGGAQQQAQPQDDNVVDAELQE

SEQ ID NO: 1713 - protein, 626 aa, Ralstonia metallidurans
MAARDLRARDSGYRAGRGDRLCQRHRASARREGRRQAWTAHAGIVLRAHRRHGGLCRDWPRQRDPADHGGGHLHGARPCGHGRAAAGRVRAAGSHAARPVPGQPLRPALLASSATGDARMKAQEIAACWQAMDLPPPWTPAEGAAPGVLAVRSPIDGEVFGQLAMCDAALANARIARAHAAQTTWALTPAPARGEVVRRFGEALRANKDALGRLVSLESGKILQEGLGEVQEMIDICDFAVGLSRQLHGLTIASERPAHAMRETWHPYGLCGVISAFNFPVAVWAWNAALALVCGNGVVWKPSEKTPLCALAAQGLLDRVFERHAPQFDGLSCVLTGGRQLGEHLVQHPAVRLMSATGSTRMGREVGMACAAHFKRAILELGGNNAAIVTPSAELEMTIRAMTFAAAGTAGQRCTTLRRAFVHADLIETVTNRLRQVFARLPVGDPLEDGTLVGPLIDHAAGDTMANALASCRAQGNVVHGGERLLGDRYPHACYVRPALVLTDAQHDTMLTETFAPILYLMPYTSLDEAIALNNAASHGLSSCIFTESLREAERFLSSAGSDCGIANVNIGTSGAEIGGAFGGEKATGGGRESGSDAWKGYMRRATNTINYGDALPLAQGIRFDV

SEQ ID NO: 1714 - protein, 509 aa, Burkholderia fungorum
MSVADASRVGAFCRAFRRAGASDVDSATFRAIADFQENAGPPRVFRPAGSPFGGFHPSGWLGAKHRAWGRLTATGHTGHIPVAAVAFAFVIYEKGVTVSRRRVVVTGLGLISPVGNNVADGWANLVAGKSGIANITKFDASNFSTRFAGEVKGFNIEDYIPGKEARHMDTFIHYGVAAGIQAMQDSGLEVTDENSERIGVVVGSGIGGLPMIEVTQTELLNRGPRRISPFFVPASIINMISGHLSIKFGIKGPNLAIVTACTTGLHCIGEASRLIEYGDADVMIAGGAESTVSPLGVGGFAAARALSQRNDDPATASRPWDKDRDGFVLGEGAGVMVLEEYEHAKARGAKIYAEVSGYGMSGDAYHMTAPLEDGDGARRCMLAALKNAGINLDQVNYLNAHGTSTPLGDLAETTGIKRAFGDHAKDMVVNSTKSMTGHLLGGAGGLESVFTVLAVHHQVSPPTINIFNQDPACDLDYCANTAREMKIDVALKNSFGFGGTNGTLVFKRA

SEQ ID NO: 1715 - protein, 423 aa, Burkholderia fungorum
MADKKGSNSEKLLYCSFCGKSQHEVKKLIAGPSVFICDECIDLCNEIIRDEAAGAGIEAGLSKSDLPSPQEIREILDQYVIGQERAKKILAVAVYNHYKRLKHLDKKDEIELSKSNILLIGPTGSGKTLLAQTLARLLNVPFVIADATTLTEAGYVGEDVENIIQKLLQNCNYEVDKAQRGIVYIDEIDKISRKSDNPSITRDVSGEGVQQALLKLVEGTMASVPPQGGRKHPNQDFIQVDTTNILFICGGAFDGLEKVIVDRTEKTGIGFGASVKSKQDRDAGEVLREVEPEDLIKFGLIPELIGRLPVVATLGKLDEVALMKILVEPKNALVKQYHKLFNMERVELEIRPAALQAVARKAIRRKTGARGLRSILEQALLDVMYDLPQMKGISKVIIDDNVIDGDGKPLLIYEDAPKVAGSN

SEQ ID NO: 1716 - protein, 527 aa, Burkholderia fungorum
MQLIGHQSGRTVHSLTKPARHRVLQGGSGSVARLRGTPPGPDATHPRAPREPRRTCNMGRLIVVSNRVATPTETKGSAGGLAVGVFGALKDAGGVWFGWSGDVVSETVANAGPTLEQDGAVTFATVGLTRKDYDQYYRGFSNATLWPVFHYRNDLARYEREEYTGYRRVNAWLAHKLIKLLEPDDVIWIHDYHLIPFAEALRNEGVTNRIGFFLHIPFPAPQILLNIPPHEELVKSLSCYDLLGFQTATDELAFKDYVTRHARGTVSADGLVEAFGRKLRTGVYRIGVFPDEIAEQAKRYESRQHVLDLKQSLEGRKLIMSVDRLDYSKGLVERFRAFEHLLERSPEWRGNVTLVQIAPPTRSDVATYQKIRQDLEYEAGRINGRYSGLDYTPIRYLNQQYDRWKLMSLFRESQIGFVTPLHDGMNLVAKEYVAAQNPDDPGVLVLSIFAGAAAELSGALLVNPHDAIGMCEALQRALQMPLDARQRRHEINMAALRKNDLGVWRDTFLHDLRSVPVQQPGKGGGHN

SEQ ID NO: 1717 - protein, 565 aa, Burkholderia fungorum
MRARCLAAGMHERREPYIYRTSYSSSVSLQAFFACRCRANTLAAIKTRVYSFRTYSCFASEIKGIFMDASTILADLGIAHAAQAGDIAVHSPITGELIGRVASNTVAEVDTALAQAKQAYTAWRNVPAPRRGELVRLLGNRLREKKQALGSIITLETGKILQEGMGEVQEMIDICDFAVGLSRQLYGLTIASERPGHRMAETWHPVGTCVVISAFNFPAAVWSWNAALALVCGNAVIWKPSEKTPLTALAVNQILSEALQEFGDAPAGLTALINGGRDVGAKLVADPRASIVSATGSTEMGRTVGVEVAKRFGRSLLELGGNNAGIVTQTADHELAMRGILFSAVGTAGQRCTSLRRLFVHESVYDKTIERLKQLYSKVPIGNPLEKGTLMGPLIDKQSYGRMQEALQQATAEGGKVFGGERVEVKGYEGGYYVRPAIVEMPSQTSVVLKETFAPILYVLRYTDFADAVEANNAAVHGLSSCVFTTDLREAERFLSDSGSDCGIANVNIGPSGAEIGGAFGGEKETGGGRESGSDAWKAYMRRATNTVNYSSALPLAQGIDFNIG

SEQ ID NO: 1718 - protein, 486 aa, Burkholderia fungorum
MGRLIIVSNRVAPISEGGPAAGGLAVGVYDALKETGGMWFGWSGDVLSSGQPQIKVEERGPVTFATIALMRRDYDQYYRGFSNATLWPAFHYRADLLQYDRHDFEGYWRVNAWLAQQLVPLLREDDVIWVHDYHLIPFAQALRAAGVKNRIGFFLHIPFPASQVLLAVPPHRELVEALCSFDLLGFQTAPDLRAFCDYIVNEANGTADPSASGPLTIHAFGRTLRAAAYPIGVYPDEIAELAKAGERGKPVRTMKATLHSRKLIMSVDRLDYSKGLVERFRAFERLLEHSTAQRNKVSFLQIAPPTRADMHAYQDIRLQLEGESGRINGRFAELDWTPILYIHKQYERSVLAALFRTAHVGYVTPLRDGMNLVAKEYVSAQDPENPGVLVLSRFAGAAQELDGALIVNPVDIDGMAEALARALDMPLAERQARHRDMMVQLRENNVSVWRDNFMRDLQGVAGAKGTRNGKARAVAGKKAARETQAG

SEQ ID NO: 1719 - protein, 653 aa, Burkholderia fungorum
MGKIIGIDLGTTNSCVAIMEGNSVKVIENSEGARTTPSIIAYMEDGEILVGAPAKRQSVTNPKNTLYAVKRLIGRRFEEKEVQKDIGLMPYKIIKADNGDAWVEVRDQKLAPPQISAEVLRKMKKTAEDYLGEPVTEAVITVPAYFNDSQRQATKDAGRIAGLEVKRIINEPTAAALAFGLDKNEKGDRKIAVYDLGGGTFDVSIIEIADVDGEKQFEVLSTNGDTFLGGEDFDQRIIDYIIGEFKKEQGVDLSKDVLALQRLKESAEKAKIELSSSQQTEINLPYITADASGPKHLNLKITRAKLEALVEELIERTIEPCRVAIKDAGVKVGEIDDVILVGGMTRMPKVQEKVKEFFGKDPRRDVNPDEAVAVGAAIQGQVLSGDRKDVLLLDVTPLSLGIETLGGVMTKMINKNTTIPTKHSQVYSTADDNQGAVTIKVFQGEREMAAGNKLLGEFNLEGIPPAPRGTPQIEVSFDIDANGILHVGAKDKATGKENRITIKANSGLSEAEIEKMVKDAEANAEEDHKLRELADARNQGDALVHSTKKALTEYGDKLEAGEKEKIESALKDLEETLKSGSSDKAAIEAKIEVVATASQKMGEKMYADMQAAQGAEAAAAGAAGAGGAGASAGGASQQQDDVVDAEFKEVKKD

SEQ ID NO: 1720 - protein, 460 aa, Burkholderia fungorum
MSRLVVVSNRTVDPRKTAAGGLAVAVRESLQRTGGLWFGWSGKIYDESDEMTSRRGVHVQTLGNVTLATVDLSQQDHDNYYLGYANGVLWPVFHYRLDLADFDTRFAAGYRRVNQLFAEKLLPLLRPDDIIWVHDYHLIPLAAELRAIGCGNRIGFFLHIPMPPPMIMAAIPEHEWLMRSLFAYDLVGFQGQIDVEHFTHYAESEANARQVGPQQLRAFNRTLRLGAYPIGIDVEEFVSLANGKEAREMFTRMRDEYSRRRLLLGVDRLDYSKGLPQRIHAFRELLAHYPENRDSATLIQIASPSRESVAAYDDLRRQMDSLCGAINGDYGELDWMPVRYIHRHVARKRLPGLYRASKVALVTPLRDGMNLVAKEFIAAQDPSDPGMLVLSRFAGAAEQLKEALLVNPYDTQGTAHAIQRALTMPLDERRNRHAALMKRIREHDVHWWSSSFLDTLQDIP

SEQ ID NO: 1721 - protein, 475 aa, Burkholderia fungorum
MSRLIVVSNRVAPTQEGRPAAGGLAIGVLDALKETGGVWFGWSGETVSEPSAPVIEKQGNVTYATVGLTKRDYDQYYRGFSNATLWPTFHYRNDLSRYDRQEYAGYQRVNATLAKQLKELLKPDDIIWVHDYHLLPFARCLRELGVKNPIGFFLHIPFPVPEVLRTIPPHEELVKAMCSYDVIGFQTDADRQSFVDFIERGQHGTSSEDGMVHAYNRFLKVGAYPIGIYPDAIAKAAEQFTDRKPVRSLRDGMRGRKLIMSVDRLDYSKGLVERFQAFERLLLNAPGWHGRVSLVQIAPPTRADVQTYQRIRQTLEGEAGRINGRFAQLDWTPIQYLNRKYERNLLMALFRQSQVGYVTPLRDGMNLVAKEYVASQDPADPGVLVLSQFAGAAEQLPGALVVNPFDLSQMAEALERALSMPLAERQARHADMMAPMRENNLSVWRDTFLADLRNVATASSVTAKAVKLADVTASS

SEQ ID NO: 1722 - protein, 338 aa, Burkholderia fungorum
MALQRRTTLTKYLIEQQRETNNLPADLRLLIEVVARACKAISYHVSKGALGDALGTAGSENVQGEVQKKLDILSNEILLEANEWGGNLAGMASEEMEQFFPIPANYPKGEYLLVFDPLDGSSNIDVNVSIGTIFSVLRCPDGQQPTEQSFLQPGTQQVAAGYAVYGPQTVLVLTTGNGVNCFTLDRELGSWVLTQSDMRIPVETREYAINASNERHWYPPVQQYIGELKDGKEGSRQSDFNMRWIASMVADVHRILNRGGIFMYPADKRTPDKPGKLRLMYEANPMAFIVEQAGGAATNGEKRILDIQPKSLHERVAVFLGSKNEVDRVTRYHLETKK

SEQ ID NO: 1723 - protein, 378 aa, Burkholderia fungorum
MQDGRTTLSKFLIDTLDRQPCSTETARNAGLSALLIDVAAAIKSISAMLTKGALGGNYGSAQSINTHGEEQKKLDVATNEIFVQQCEWDGLLAAMVSEEMESVYAIPPGYPRGDYLLAFDPLDGSSNIDINGVVGSIFSVLRNGEGNGNANEKNGSDPRGTVGESAFLRPGCEQVAAGYAVYGPSTMLVLSVGNGTHGFTLEREIGNFVLTHSNIRIPEDTVEFAINASNERFWEPPVRRYVQECKDGRSGCRASDFNMRWIASMVAEVHRILMRGGVFMYPRDSKTPAMEGRLRLLYEANPMSFLVEQAGGLSITGRERILDVVPRALHGRVPVILGSKHEVERIGRYHGEYDRGEDQPFTSPLFSRRSLFLPGFTA

SEQ ID NO: 1724 - protein, 361 aa, Enterococcus faecium
MKWPAAILNVLSAKDILIEGKGIIDGQGDHWWELYWGKDQKSGTRAEYDQKGLRWIADYAIKRPRACLLYHAEHVVVRDLIFQKSGFWNLQITYSNDVLVEKVIIRNNDGPSTDGIDIDSSTNVRVYECDLACGDDCIAIKSGRDGNGARVNRKSSRIEVARCKIRSGYGVTIGSEVSAGVSDVYIHDIDFFQSDCGIRMKSSKERGGVIENIRVENLNMIDVQFPFSWIMDWHNEYNRKNSNDLAQMPESWQAVAEEIPESKQMTKVKDIHIKNVQACLSPGYSLPSRAFDLVAFPEKPIEDVCFSHCQITAKEFGRIEAVQNLCFKSCDLSIETGNTAANNTFDIVEIIIRSSLNNILA

SEQ ID NO: 1725 - protein, 169 aa, Enterococcus faecium
MVHLMASKRCEESYGRKDDGFGTQNQKLSEDESVMQHIIPEDLLKFGLIPEFIGRLPVMAALEKLTTDDLVRILTEPKNALVKQYQKLLSLDNTELEFEPEALRAIAKKAIERNTGARGLRSIIEEIMMDVMFDIPSNENIEKVIITKEAAELSGEPTVIYKDSEKKAG

SEQ ID NO: 1726 - protein, 314 aa, Enterococcus faecium
MSFHNCHRITVKDIKLIQSPSWTINPILCSNATFDNLTILNPADSPNTDGIDPESCKNVRISNCHIDVGDDCIAIKAGTEDTYERIACENITITNCTMVHGHGGVVLGSEMSGSIRNITISNCIFQETDRGIRLKSRRGRGGIVEDIRVSNIVMDNVMCPFILNLYYFCGPRGKEPYVWEKKAYPIDERTPAFRRIHFSNITARNVHASAGFIYGLAEQFIQEITFDNIDVSMAQDAVPGVPAMMTGIEEMSRQGFYIGFAGKVSFNQMSIENHEGPAFLLENTKEISIEKFQSNQSENMDELVVRKNFAYAVE

SEQ ID NO: 1727 - protein, 579 aa, Enterococcus faecium
MAENMSDASIQDMCLVGDLGVIGEIIEMRGDVASIQVYEETSGIGPGEPVRSTGEALSVELGPGIISQMFDGIQRPLDTFMEITQSNFLGRGVQLPALDHEKKWWFEPTVEAGETVSAGDVIGIVEETKVIKHKIMVPNGIKGTIKTIEKGSFTIDETVCVIETENGDKNLTMLQKWPVRRSRPIKEKLNPDAPMITGQRVIDTFFPVTKGGAAAVPGPFGAGKTVVQHQIAKWADVDMVVYVGCGERGNEMTDVLNEFPELIDPNTGESLMERTVLIANTSNMPVAAREASIYTGITIAEYFRDMGYDVAIMADSTSRWAEALREMSGRLEEMPGDEGYPAYLGSRLAEYYERSGRVIALGSEGREGSITAISAVSPSGGDISEPVTQNTLRVVKVFWGLDSSLAQKRHFPSIDWIQSYSLYSTEVGKYMDHILQADWASMVTEGMRILQEEQQLNEIVRLVGIDSLSDNDRLTLEVAKSIREDYLQQNAFDDVDTFTSREKQFKMLKMILTFGEEGRRALSLGAYLSEIMDGTVSIRERIGRSKYIPETELEKLDQIIGEIKQTMQTIVSEGGMSND

SEQ ID NO: 1728 - protein, 426 aa, Xylella fastidiosa
MSEDRLSRSGDGNKILYCSFCGKSQREVRKLIAGPSVFICDECVELCNDIIREELEEKSQSARSSLPKPKEILEVLDQYVIGQQRAKRTLAVAVYNHYKRIESRHKNDDIELAKSNILLVGPTGSGKTLLAETLARLLNVPFTIADATTLTEAGYVGEDVENIIQKLLQKCDYDVEKAQHGIVYIDEIDKISRKSENPSITRDVSGEGVQQALLKLIEGTVASVPPQGGRKHPQQEFLQVDTKNILFICGGAFAGLDKVIQQRCTEAGGIGFGVKVKSSESKRDVGKVLAGVEPEDLIKFGLIPEFVGRLPVVATLDELDESALVKILTEPKNAITKQFKKLFEMENVELEFRQDALSAVARKALKRKTGARGLRTIVELVLLDTMYELPSQEGISKVVVDESVIENKSEPYLIYQTMPAKVASGE

SEQ ID NO: 1729 - protein, 638 aa, Xylella fastidiosa
MGKIIGIDLGTTNSCLAIIEGGKGRVIENSEGDRTTPSIVAYTKDGEVLVGAAAKRQAVTNPKNTFYAVKRLIGRKFGDAEVQKDLDLVPYKITQHDNGDAWVATADGKKLAPQEISAKVLEKMKKTAEDFLGEKVTEAVITVPAYFNDSQRQATKDAGRIAGLDVKRIINEPTAAALAYGLDKKGGDRKIAVYDLGGGTFDVSIIEIAEVDGEKQFEVLATNGDTFLGGEDFDKRVIDYLVDEFNKDQGIDLRKDPLALQRLKDAAERAKIELSSSQQTEVNLPYITADASGPKHLNIKLTRAKLEALVDDLVRKSIEPCRIALNDAGLRTSDVQEVILVGGQTRMPKVQQAVADFFGKEPRKDVNPDEAVALGAAIQGGVLAGDVKDVLLLDVTPLSLGIETMGGVFTKIIEKNTTIPTKASQVFSTAEDGQSAVTVHVLQGEREQARFNKSLAKFDLAGIEPAPRGQPQIEVSFDIDANGILHVSAKDKKTNKEQKVEVKAGSGLSDSEIQQMVADAEAHREEDKKFQELVQARNHADGLIHSTRSAIKEHGSKVGGELIGRVEASLAELEAAVKGDDKNQIEAKSKTLEEVAQSLHMAATAEQQSASTGAGAGSSAKVDDVVDAEFTEVKGDKK

SEQ ID NO: 1730 - protein, 411 aa, Xylella fastidiosa
MNRRVVVTGMGMVSPLGNDLTTSWDGIVHGRSGIAPIVQIDASKFPTQIAGEIKGFDPMKFVSAKDAKKMDSFIYYGIGAAFMALDDAGLEINEINAERVGALIGSGIGGVFGIEEQTIKLYEGGARKISPFYVPATIINMLPGQLSVLKGLKGPTFSAVSACATSNHSIGMAMRMIQYGDADVMLAGGSERASSPTAIGGFCAMRAMSTRNDDPTGASRPWDKGRDGFVLGDGAGILVLEEYEYAKARGARIYAELAGFGATSDAFHMTMPVEDGEGAARCMRIALQDAKVTPEQIDYLNAHGTSTPLGDLCETNAIKTVLGDHAYKVMVSSTKSMTGHLLGAAGGVEAIFSVMALHTGIVPPTINLEEPDEGCDLDYVPHVAREAKLDVVVSNGFGFGGTNGTLVFKRI

SEQ ID NO: 1731 - protein, 501 aa, Xylella fastidiosa
MLFWLASVKEAFFMSERQRRTRILATLGPATDPPGVLDALFKAGVNVVRLNFSHGDVSDQARRAAEVRAAAAHVGVEIGILADLPGPKIRIGRFIGGKVRLVAGARFDLLADSNASLGDATQVGVSYLGLPQDVVAGDVLLLDDGLMQLQVVQVQGARIVTTVLNDGVLSDRKGLNKQGGGLSLGALTDRDRELIGIVARMGIDFIAVSFCRHAEEMHEARRIARECGCDAALVSKIERAEAIVNLAEIVAASDVVMVARGDLGVEIGDAQLPGLQKKIIKEALLQNKVVITATQMLQSMVESPMPTRAEVLDVANAVIDGTDAVMLSAETATGDYPVKAVEAMARICLGAEHQFEFDTDYEMAQRNLQRADHAIAMATMFLSEHICLGGVVALTESGTTPRFLSRFRSHVPIYAFTRHEDVRRRMVLMRGVFPMRFDSRGLTPREAARATIRLLVECGCMSPGDRVVFTSGEHMETLGATNTLRLLEVGADGCVSGLWEL

SEQ ID NO: 1732 - protein, 287 aa, Xylella fastidiosa
MPFTIADATTLTEAGYVGEDVENIIQKLLQKCDYDVEKAQHGIVYIDEIDKISRKSENPSITRDVSGEGVQQALLKLIEGTVASVPPQGGRKHPQQEFLQVDTKNILFICGGAFAGLDKVIQQRCTEVGGIGFGVKVKSSESKRDVGKVLAGVEPEDLIKFGLIPEFVGRLPVVATLDELDESALVKILTEPKNAITKQFKKLFEMENVELEFRQDALSAVARKALKRKTGARGLRTIVELVLLDTMYELPSQEGISKVVVDESVIENKSEPYLIYQTMPAKVASGE

SEQ ID NO: 1733 - protein, 501 aa, Xylella fastidiosa
MLFLLASVKEAFFMSERQRRTRILATLGPATDPPGVLDALFKAGVNVVRLNFSHGDVSDQARRVAEVRAAAAHVGVEIGILADLPGPKIRIGRFTGGKVRLVAGARFDLLADSNASLGDATQVGVSYLGLPQDVAAGDVLLLDDGLMQLQVVQVQGARIVTTVLNDGVLSDRKGLNKQGGGLSLGALTDRDRELIRIVARMGIDFIAVSFCRHAEEMHEARRIARECGCDAALVSKIERAEAIVNLAEIVAASDVVMVARGDLGVEIGDAQLPGLQKKIIKEALLQNKVVITATQMLQSMVESPMPTRAEVLDVANAVIDGTDAVMLSAETATGDYPVKAVEAMARICLGAEHQFEFDTDYEMAQRNLQRADHAIAMATMFLSEHICLGGVVALTESGTTPRFLSRFRSHVPIYAFTRHEDVRRRMVLMRGVFPMRFDSRGLTPREAARATIRLLVECGCMSPGDRVVFTSGEHMETLGATNTLRLLEVGADGCVSGLWEL

SEQ ID NO: 1734 - protein, 411 aa, Xylella fastidiosa
MNRRVVVTGMGMVSPLGNDLTTSWDGIVHGRSGVAPIVQIDASKFSTQIAGEIKGFDPMKFVSAKDAKKMDSFIYYGIGAAFMALDDAGLEINEINAERVGALIGSGIGGVFGIEEQTIKLYEGGARKISPFYVPATIINMLPGQLSILKGLKGPTFSAVSACATSNHSIGMAMRMIQYGDADVMLAGGSERASSPTAIGGFCAMRAMSTRNDDPTGASRPWDKGRDGFVLGDGAGILVLEEYEYAKARGARIYAELAGFGATSDAFHMTMPVEDGEGAARCMRIALQDAKVTPEQIDHLNAHGTSTPLGDLCETNAIKTVLGDHAYKVMVSSTKSMTGHLLGAAGGVEAIFSVMALHTGIVPPTINLEEPDEGCDLDYVPHVAREAKLDVVVSNGFGFGGTNGTLVFKRI

SEQ ID NO: 1735 - protein, 638 aa, Xylella fastidiosa
MGKIIGIDLGTTNSCLAIIEGGKGRVIENSEGDRTTPSIVAYTKDGEILVGAAAKRQAVTNPKNTFYAVKRLIGRKFGDAEVQKDLDLVPYKITQHDNGDAWVATADGKKLAPQEISAKVLEKMKKTAEDFLGEKVTEAVITVPAYFNDSQRQATKDAGRIAGLDVKRIINEPTAAALAYGLDKKGGDRKIAVYDLGGGTFDVSIIEIAEVDGEKQFEVLATNGDTFLGGEDFDKRVIDYLVDEFNKDQGIDLRKDPLALQRLKDAAERAKIELSSSQQTEVNLPYITADASGPKHLNIKLTRAKLEALVDDLVRKSIEPCRIALNDAGLRTSDVQEVILVGGQTRMPKVQQAVADFFGKEPRKDVNPDEAVALGAAIQGGVLAGDVKDVLLLDVTPLSLGIETMGGVFTKIIEKNTTIPTKASQVFSTAEDGQSAVTVHVLQGEREQARFNKSLAKFDLAGIEPAPRGQPQIEVSFDIDANGILHVSAKDKKTNKEQKVEVKAGSGLSDSEIQQMVADAEAHREEDKKFQELVQARNHADGLIHSTRSAIKEHGSKVGGELIGRVEASLAELEAAVKGDDKNQIEAKSKTLEEVAQSLHMAATAEQQSGSTGAGAGASAKVDDVVDAEFTEVKADKK

SEQ ID NO: 1736 - protein, 476 aa, Magnetococcus sp.
MVQHSPTVIVWFRRDLRLSDNPALLAATAMGQVLPVYIHENNQQEGGGGAWRWGLQQALAALNADLQGKLCCYVGDPARLLPEVAHAVGATGVYWNRLYTPQAIKRDRAIKQSLIERGLQVRSFNGSLLWEPWQVLKADKTPYKVFTPYYRRGCLVQDVPRQPMDAPPTVTWATLPAAAPAPSMQALDALLLGDVSWHKKWHGIWSMGEEAAQTRFEHFLSHGLACYDQGRDFPGRDCTSRLSTALQYGLLSPNQVWYGLEHAKADEHSVDKFRSELAWREFAYYQLFHFPSLPHKNFQPKFDHFPWLEDEVALGRWQTGQTGIPIVDAGMRELWQTGVMHNRVRMLVGSFLVKNLLLDWRAGAAWFKDCLVDYDLAINSASWQWVAGCGADAAPYFRIFNPVTQGEKFDRNGTYTRRFVPELANLPDQYLFKPWMAPASILRQAGVRLGQDYPEPLVDLAASRAQALAAFQALKI

SEQ ID NO: 1737 - protein, 123 aa, Magnetococcus sp.
MTQEEMISAIESMTVLELSELVKALEEKFGVSAAAPVAVAAAVGGGEAVVEEAKTEFDVILASAGDKKIHVIKAVREMTGLGLKEAKDLVEGAPKAVKEAVSKDEADKLKAKLEEAGAVVEIK

SEQ ID NO: 1738 - protein, 436 aa, Magnetococcus sp.
MSPAHLGGTCYGVELTMPNNSSDSSSILHCSFCGKSQNEARKLIAGPSVFICDECVDLCMEIIREDKSDQLEKKRGGVPTPMEIKSTLDDYVIGQDNAKRTLAVAVYNHYKRLESNDTSADVEISKSNVLMIGPTGSGKTLLAQTLARLLDVPFTITDATTLTEAGYVGEDVENIILRLLQAADNDVEKAQRGIVFIDEIDKISRKSDNPSITRDVSGEGVQQALLKIIEGTVASVPPQGGRKHPQQEYLQVDTTNILVICGGAFNGLEKVIEKRSSKHHGIGFGATVRKNSKEESVNVLLKELEPEDLLAFGLIPEFVGRLPVVATLEELSKEALVRILTEPKNALVKQYQKLLEMENVKLTFTDGALEALAQRAIERKTGARGLRALLESTLLDIMFEIPSKQGVREVVINREVVEKQIEPLLIYAEEALEANA

SEQ ID NO: 1739 - protein, 503 aa, Magnetococcus sp.
MPRPQVNCCLALLSVTIATASCSYVQDAVCRSVRLGCSVSRGCRAFLATALVRKLVATLGHYGLSIHFHAVCSCLEHGTAIEAAERVLFVNHRVVITGVGLVTPLGVGNDVTWSRLIAGESGIGLLTSFDTEEYSCKIGGEIKDFNPEQWIEKKEVKKMDRFIHYGLAASQLAWEDSGLEAPDEEASYRYGAIVGSGIGGLIAIQNQAIALKEKGPRRISPFFIPMSLINLVSGQLAIKYGLRGPNHAVVTACATGTHAIGDAYRIVQRGEADVMVAGGAEAAICELGIGGFAAARALSTRNDDPTRASRPWDKGRDGFVQSDGAGVVVVESMEHAKARGARIYAEVVGYGMSGDAYHITAPHPSGDGAARCMAAALKDAQMDPSGIGYINAHGTSTPQGDVIETKAVKKIFGESGAKKVMVSSTKSMTGHLLGAAGGIEAIFTAKALHEGVIPPTINLDDPDPECDLDFVPHTARQEQVEAALSNSFGFGGTNATLVLKRVR

SEQ ID NO: 1740 - protein, 526 aa, Magnetococcus sp.
MGKVVGIDLGTTNSCVSIMEGGEPKVIENSEGVRTTPSMVAFTNQGERLVGQAAKRQAVTNPTNTLYAIKRLIGRRFSDPLTAKDQGLVPYKIVKADNGDAWVEADGKKMSPSECSAMILQKMKQTAEDYLGESVSEAVITVPAYFNDAQRQATKDAGRIAGLEVLRIINEPTAAALAYGLDKKDGQTIAVFDLGGGTFDISILEIGDGVFEVKSTNGDTFLGGEDFDMAIIDYLADQFKKENSIDLRKDSMALQRLKEAAEKAKIELSSSNQTDINLPFITADASGPKHLNLSLTRAKLESLVDELVQRTLAPCRTALKDAGMTAADIDEVILVGGMTRMPKVQAVVGQFFGKEPHKGVNPDEVVAIGAAIQGGVLKGEVQDVLLLDVTPLSLGIETLGGVFTKLIEKNTTVPTRKSQVFSTAADNQSAVTIRVAQGEREMFSDNKTLGQFDLVGIAPAPRGMPQIEVTFDIDANGMVHVSAKDKGTGKEQSIHIEASGGLTSEEIDRMVHEAESHAEEDAKKRA

SEQ ID NO: 1741 - protein, 589 aa, Lactobacillus gasseri
MKKTKIVSTLGPASNDVETITKLAEAGANVFRFNFSHGDHEEHRARMNMVREIEKKTGKLLGIALDTKGAEIRTTEQEGGKFTINTGDTIRISMDDTKKGNKDMIHVTYDGLYDDTHVGGHVLIDDGLVDLLIKEKDDAKRELVCEAQNTGLIGSKKGVNAPGVEIRLPGITEKDTNDIKFGLKEGINFIFASFVRKAQDVLDIRQLLEEAHCEYVKIFPKIESQEGIDNIDEILKVSDGLMVARGDMGVEIPFINVPFVQKELIRRCNALGKPVITATQMLDSMQENPRPTRAEVTDVANAVLDGTDATMLSGESANGLYPVKAVKAMAEIDMRTEKQLAKRNKLALQRFEEYKGSNVTEAIGESVVRTAEELGVKTIIAATESGYTARMISKYRPNADIIAMTFDEKIEHSLGVVWGVKPMLVEKPKTTEEMFDKAAELAKETGLAKDGDLVIIVAGVPLGETGTTNLMKLQLIGTQLVKGLGVGEQSVIGKAVVATSAEEANSKVQDGDILVAKTTDKDYLPAIKKASGMVVEASGLTSHAAVVGLSLGIPVVVGATDAVEKIKDGSKITVDARRGAVYQGEATNL

SEQ ID NO: 1742 - protein, 126 aa, Magnetospirillum magnetotacticum
MADLAKIVEDLSSLTVLEAAELAKLLEEKWGVSAAAAVAVAAGPAAGGGAAAAAEEQTEFTVVLASAGDKKIEVIKEVRAITGLGLKEAKDLVEGAPKPVKEAVAKDEAEKIKAQLEKAGGKVELK

SEQ ID NO: 1743 - protein, 265 aa, Magnetospirillum magnetotacticum
PTWPSAVQASDYNVERSQRGIVYIDEIDKISRKSDNPSITRDVSGEGVQQALLKIMEGTVASVPPQGGRKHPQQEFLQVDTTNILFICGGAFAGLERIISQRGKGTSIGFGASVQAPDDRRTGEIFRSVEPEDLLKFGLIPEFVGRLPVLATLEDLDEEALKKILQEPKNALVKQYQRLFEMENVELTFQDEALSLVARKAIERKTGARGLRSILETILLDTMYDLPGLDSVEQVVIGPEVVEGKSRPLFIHGDRNKDAPASVSA

SEQ ID NO: 1744 - protein, 378 aa, Magnetospirillum magnetotacticum
LVPPVVIVVSTPLMFHDLAAQIAGVVPRGTNPGELDLDAVAPAKDRRRMDDFIVYGLAAASEAVEDSGWMPTDSESLERTGVMIGSGIGGLPNIADGAITLEKSGPRRISPFFIPAALINLVSGHVSIRYGFKGPNHAVVTACATGAHAIGDAARLIMFDDADVMVAGGTEAAVHRLGIAGFAAAKALCTSYNDRPTEASRPWDKDRDGFVMGEGAGIVVLEELEHAKKRGAKIYGEVIGYGMSGDAHHITAPAEDGNGAVRAMRAAIKRAGVSLDEIDYVNAHGTATMGDTIELGAVKQVFGDHAYKLSMSSTKSAIGHLLGAAGAVEAIYSLLAIRDQVAPPTLNLHNPDEGCDIDLVPLKAKQRKIKVALSNSFG

SEQ ID NO: 1745 - protein, 125 aa, Magnetospirillum magnetotacticum
MADLAKLVDDLSALTVLEAAELSKLLEEKWGVSAAAPVAVAAVAGAGAAAPAAEEQTEFDVILTDAGEKKINVIKEVRAITGLGLKEVKDLVEAAPKSVKDGVSKDEAEKIKKVLEEAGAKVQVK

SEQ ID NO: 1746 - protein, 337 aa, Magnetospirillum magnetotacticum
MPYKRITLTHFLLQEQRRLGGSGSFTALMTDIIFACKMISHEVNRGALAGNLGVAGSENVQGEEQKKLDVLANDIFLHMNALGGSYAGMASEELEDVHAVHGAADGKYLLLFDPLDGSSNIDVNISVGSIFSILKLPEGADAGSKDAFLQPGVKQVAAGYALYGSSTMMVLTTGNGVNGFTLDNNVGMFLLTHPNMTIPADTKEFAINASRERFWEPPVKRYIDECRQGKEGPRGKDFNMRWVASMVAEVHRILCRGGVFLYPADTENMKKGGKLRLMYEANPMAFIVEQAGGAATTGRGRMMEVQPTGLHQRVPVILGSKTEVERIGAYHTEYDAK

SEQ ID NO: 1747 - protein, 422 aa, Magnetospirillum magnetotacticum
MTKSTSGESKNTLYCSFCGKSQHEVRKLIAGPTVFICDECVELCMDIIREEHKTHLVRSRDGVPTPKDICQVLDDYVIGQGHAKKVLSVAVHNHYKRLQHGGKNNNEVELAKSNILLIGPTGCGKTLLAQTLARILDVPFTMADATTLTEAGYVGEDVENIILKLLQAAEYNVERAQRGIVYIDEVDKISRKSDNPSITRDVSGEGVQQALLKIMEGTVASVPPQGGRKHPQQEFLQVDTTNILFICGGAFSGLEKIIGSRGRGTSIGFGADVRGPDERRTGEILREVEPEDLLKFGLIPEFVGRLPVLATLEDLDVDALIDILSKPKNALVKQYQRLFEMEDTRLSFSDDALKAIAEKAIARKTGARGLRSIMETILLDTMFDLPGLDAVDEVVINKEVVEGRAKPLYIYSERREDVGSSA

SEQ ID NO: 1748 - protein, 644 aa, Magnetospirillum magnetotacticum
MSKVIGIDLGTTNSCVAVMEGKNAKVIENAEGMRTTPSMTAFTESGERLVGQPAKRQAVTNPTSTLFAIKRLIGRRFDDPITKKDMNLVPYHIVAGDNGDAWVEARDAKYSPSQVSAFILQKMKETAEGYLGEKVTQAVITVPAYFNDAQRQATKDAGRIAGLEVLRIINEPTAAALAYGLEKKSAGTIAVYDLGGGTFDVSVLEIGDGVFEVKSTNGDTFLGGEDFDARIMDYLADEFKKEQGIDLRKDRLALQRLKEAAEKAKIELSSSMQTEVNLPFITADASGPKHLNIKLTRSKLEALVEDLVARTVEPCKAALKDAGVKASEIDEVILVGGMTRMPKIQEVVKEFFGREPHKGVNPDEVVAIGAAIQGGVLKGEVKDVLLLDVTPLSLGIETLGGVFTRLIDRNTTIPTRKSQVFSTAEDNQTAVTIRVFQGEREMAADNKVLGQFDLVGIPPAPRGVPQVEVTFDIDANGLVNVSAKDKATGKEQQIRIQASGGLSDTDIEKMVKEAEIHAAEDKKRKELIEARNHADGLIHTTEKSLKEFGDKAGAELTGAIEKEITALKAVMEKDDVEAIKAKTEDLMQASMKLGEAMYKAQEAAGGSEAEAAAGGGAHGGASGGHDDKVVDADFEEVDGDKKGK

SEQ ID NO: 1749 - protein, 476 aa, Thermobifida fusca
MLHVTRRAKIVATLGPATSSPEVLRKLVDAGLDVARLNLSHGTHDDHQTMYRNVRAAAEASGRNVGILADLQGPKIRLGTFVDGSVTLSPGDEFTITIDDVPGDRHRVSTTYKGLPGDVRPGDRVLIDDGRVVLECVKSTSTDVHTRVIVGGPVSNHKGLNLPGVSVAVPALTEKDERDLRWALEQGVDMVALSFVRSPADAEDVHRVMDEMGVHVPLIAKIEKPQAVERLQDIIEAFDGVMVARGDLGVELPLENVPMVQKRAIERCRDKAKPVIVATQMLESMIHNPRPTRAEASDVANAVLDGADAVMLSGETSVGKYPVETVQTMARIIAAAEQESLRASHILHRVPETVGGSIARAAAEVGATVGAKALVAFTSSGETARRLARYRSPIPLLAFTTEPATRAQLSLTWGVETHLVPWVDNTDDMVRQVENELLDMDYQKGDKVVIVAGSPPGTRGSTNMLRVHRMGDAISN

SEQ ID NO: 1750 - protein, 273 aa, Thermobifida fusca
MMRGNPVRIARFSAGDDVGFGLVDTDDEGNQFVTRMKSHPLVGPIQLTGERTKLEDVRLLSPILPTKIVCIGKNYADHIAEMGGSAEDERDPKEPVVFLKPSTAVVGPNDPVFHPKLSSRVDYEGELAVIIGRLCREVPAERAKDVIFGYTIGNDVTARDLQQADHQWTRAKGFDSFCPLGPWIETGLSVEEASQLRITTTVDGEVRQDGNTGQMIHSIPEIISYVSSFMTLLPGDVILTGTPAGVGPVRVGQRMTVAIDRIGELSNPVVARD

SEQ ID NO: 1751 - protein, 130 aa, Thermobifida fusca
MAKLSHEELLSAFEEMTLLELSEFVKLFEEKFDVTAAAPAAVVAAAPAGGGGGEAAVEEEKDEFDVILESAGDKKIQVIKEVRGLTNLGLKDAKDLVDSAPKPVLEGVNKETAEKAKAALEGAGATVTLK

SEQ ID NO: 1752 - protein, 447 aa, Thermobifida fusca
MSGSQESGKEACDGTADVLRSGWVARIGDGGDLLKCSFCGKSQKQVKRLIAGPGVYICDECIDLCNEIIEEEFADATELKWDNLPKPREIYEFLDSYVVGQEQAKKALSVAVYNHYKRIRSGGDRSRDDDVEIAKSNILLLGPTGSGKTLLAQTLAKILKVPFAIADATALTEAGYVGEDVENILLKLIQAADYDVKKAETGIIYIDEVDKVARKSENPSITRDVSGEGVQQALLKILEGTTASVPPQGGRKHPHQEFIQIDTTNVLFICGGAFSGLEKIIEARTGRQGMGFNAVVRSKKELENSDPFRDVMPEDLLKFGMIPEFVGRLPVITSVHNLDRNALIRILTEPRNALVKQYQRLFELDNVELQFTQDALEAIADQAIMRGTGARGLRAIIEEVLLSVMYEVPSRKDVARVIITREAVLEHVYPTIVPRALPPKEREEKTA

SEQ ID NO: 1753 - protein, 589 aa, Clostridium thermocellum
MSQGTIVKVSGPLVIAEGMRDANMFDVVRVSEHRLIGEIIEMHGDRASIQVYEETAGLGPGEPVVSTGAPLSVELGPGLIENIFDGIQRPLVKMREMVGSNITRGIDVTALDRSKKWDFQPTVKKGDKVTAGDVIGKVQETSIVEHRIMVPYGVQGTIEEIKSGSFTVEETVAKVRTENNELVDICMMQKWPVRIGRPYREKLPPNAPLVTGQRVIDTLFPLAKGGVAAVPGPFGSGKTVVQHQLAKWADADIVVYIGCGERGNEMTDVLKEFPELKDPKTGESLMKRTVLIANTSDMPVAAREASIYTGMTIAEYFRDMGYSVALMADSTSRWAEALREMSGRLEEMPGEEGYPAYLGSRLAQFYERAGRVVCLGSDGREGALTAIGAVSPPGGDLSEPVTQATLRIIKVFWGLDSSLAYRRHFPAINWLQSYSLYLDIIGKWISENISRDWETLRSDTMRILQEEAELEEIVRLVGVDALSPSDRLTLEAAKSIREDYLHQNAFHEVDTYTSLNKQYRMLKLILGFYYSGKKALEAGVSIKELFELPVREKIGRAKYTPEDQVNSHFNEIEKELNEQIEALIAKEVQ

SEQ ID NO: 1754 - protein, 431 aa, Clostridium thermocellum
MSRYDEKKQLKCSFCGKTQEQVKRLVAGPGVYICDECIELCSEIIEEEFEETRADAELNDIPKPSEIKEILDQYVVGQDTAKKALAVAVYNHYKRINSDVKGSDVELQKSNIVMLGPTGSGKTLLAQTLARILNVPFAIADATSLTEAGYVGEDVENILLKLIQAADYDIERAEKGIIYIDEIDKIARKSENPSITRDVSGEGVQQALLKILEGTIASVPPQGGRKHPHQEFIQIDTTNILFICGGAFDGIEKIIQNRIGKKSMGFGAKIESPKKANVGEILKNILPQDLLKFGLIPEFVGRLPVIVTLHSLDREALVKILTEPKNALVKQYQKLFEMDDVILEFEKEAIEAIADKAIERNTGARGLRAILEEIMLDVMYDIPSQENVEKCIITKDTVEKMVPPTVIINENKKSVKKPINKKSRVKKESAS

SEQ ID NO: 1755 - protein, 129 aa, Clostridium thermocellum
MASEKVTKLIEDVKALSVLELSELVKALEEEFGVSAAAPVAVAAVGAAAPGAAAPAAEEKTEFEVILKSPGADKIKVIKVVREVTGLGLKEAKDLVDGAPKTLKEGVSKDEAAQIEAKFKEVGATVEIK

SEQ ID NO: 1756 - protein, 473 aa, Leuconostoc mesenteroides
MKKTKIVSTLGPSSSDVETIVKLIQAGANVFRFNFSHGDHEEHLGRMNAVHEAEKITGKTVGILLDTKGAEIRTTKQADGKIEFHTGDTLRIAMDENLEGTKEKIAVTYAGLFDDVKEGGQVLFDDGLLGTTVIEKDSATRELVVRVDNDGILGSRKGVNAPGVSINLPGITEKDADDIRFGLDHEINYIAASFVRKPEDVLEIRGLLKEKNMEHVQIIPKIESQEGIDNLDAILEVSDALMVPRGDMGVEIPAENVPLVQKDMIRKMNKAGLPVITATQMLDSMEENPRPTRAEASDVANAVFDGTDATMLSGESANGDYPVESVATMAAIDEKAETSLRENGRHEDIFFDETDSTEAVAASVARIARNVNAKAVVVSTNSGYTARMVSKHRPDVNILAVTYSERVQRGLTLNYGVVPVVYDAPKTIDEMVDLAKKAVKDQGLANSGDTIVIAAGVPMSQSGTTNMLTVQTV

SEQ ID NO: 1757 - protein, 121 aa, Leuconostoc mesenteroides
MAFDKDAIIASLKDATILDLADLVSAIEEEFNVSAAAPVAAAGAADGAAAAKSEFDVELTSAGTAKVKVIKAVREATGLGLKEAKDLVDNAPSVVKEGLSEDDANALKESLEATGASVTVK

SEQ ID NO: 1758 - protein, 428 aa, Leuconostoc mesenteroides
MSVHALNIMTRVVITGLGAVTPLGNDTQSFLDGIFNEKIGIKPITKFDASETGITVAGQVDGFDPAARVGKRDARKMDLFSQYAVDAADQALTNAGLKAEEGAEAPTTVADPTRFGVILGNGIGGLTTIQDQVIKMHDKGPQRVSPLFVPESIPNMVSGNVSLRFGAKGINSTIVTACASATNAIGEAFWRIQSGKADVMLTGGSEATVNEIGIAGFAALTALSKEEDPTQASKPFDKNRHGFVLGEGSGILVIESLEHAQARGAHILAELVGYGASSDAYHMTSPSPDGEGAARAIRDALNDANLEANQISYINAHGTATGANDSGEAHAIATVFGENTVPVSSTKGMTGHLLGAAGAIEALISVGSLTRGELPVNVGLDEQDEDTKVVNLVDQENKHQAPEYVMSANYGFGGHNAVIVFKKWHEGV

SEQ ID NO: 1759 - protein, 433 aa, Microbulbifer degradans
MLFELPHVAGNYFLIALYFLEGKVSRKRVVVTGIGMVSALGNSVDETWSRILNGESGIREITAFDASAFATRISGSVQNLDITPYLQEKEARKLDPFIQYGMAAGIQAVEDSGLVVTDENAARIGCIVGSGIGGLGSIEDTAVLIEEKGPRRISPFFVPGAIINMIAGNLSIRYGFKGINLAVSTACTSGTHSIGLAAREIFYGTADVMIAGGAEMATTKVGIGGFAAARALSRRNDEPTKASRPWDKDRDGFVLGDGAGILVLEEYEHAKARGAKIYAELTGVGTSADAYHITSPSGDGAELSMRNAIADSGMSLEEINHVNAHGTSTPAGDTAECKALKNVFGSHAPNLAVSSTKSMIGHLLGAAGAVEAIFTVLAIRDQVAPPTINLDNPDEGCDLNFVAHKAQKMEINGAMSNSFGFGGTNGTLVFKKV

SEQ ID NO: 1760 - protein, 322 aa, Microbulbifer degradans
MQNLQGMLRDQRVAQDLQEVIFSIELACKDIAKKVQLGALAGVLGATESENVQGETQKKLDVISNDILKASLAANSNVLALASEEEDNVVAANAGGRYVVAFDPLDGSSNIDINGQIGTIFTIFEALDGVAANSGKHFLQQGNKQVCAGYVLYGASTLMVITVDGPTSCLTLDPATQTFSLTNTALQVPDQTQEFAVNLANERFWLPKFKSYVADLKLGEEGVRGKRFNMRWNASMVGDVHRVLMRGGIFMYPSDTRNPKQPAKLRLLYEANPMALLIERAGGKAFNETQRILDVTPCALHERIAVILGSEQEVATCLEYLN

SEQ ID NO: 1761 - protein, 463 aa, Microbulbifer degradans
MYKISRRTTLKGLGLTCLAGCTTSLPTLEQDPWAFAQNIADNTTIPTFPNKEFNLLEFGGKEGSDNTLAFKKAIAACSKAGGGKVVVPAGRFETGAIHLESNVNLHISEGATIAFFTDPKYYLPAVFTRWEGMECMGYSPLIYAYGKTNIAITGKGTLDGQADPTHWWAWKGNKEWGVEGYPSQKESRNQLFAQAEAGDPVRERVYADGHYLRPSFVQPYKCENVLIEDITIINAPFWLLHPTLSQNVTVRGVHLESLGPNSDGCDPESCKNVVIENCFFNTGDDCIAIKSGRNNDGRRLATPTENVIIRNCKMEAGHGGVVIGSEISGGVRNVFAENNVMSSPDLEKGIRIKTNSVRGGLLENIYVRNCTIGEVQQAIVINFQYEEGDAGKFDPTVRNVEIRNLVCQHALQVFNIRGFERAPIQNFRIIDSTFVRGDNPGVIEHTTGLVIDNVQVNGKAFNI

SEQ ID NO: 1762 - protein, 477 aa, Oenococcus oeni
MKKTKIVSTLGPASNDLKIISALINNGINVARFNFSHGDHDEHAARMALVHDAEKKTGKLIGFMLDTKGAEIRTTVQDTPNGKIEFKKGDRLRISMNEKIKGTKEKIAVTYKGLYDDVKVGGKVLFDDGIIEMTVISKDSEKKELLVQVDNDGVLGGRKGVNAPGVAINLPGITKKDKSDIEFGLEQGIDFIAASFVRKAQDVLDIRKLLKKHHQENHVMIFPKIESQEGIDNFESIIAVSDGLMVPRGDMGVEIPYEEVPVIQKMMIRYMNRLGKPVITATQMLDSMIENPRATRAEINDVENAVWDGTDATMLSGESANGSWPVEAVKTMSTSDEYAENHVHDDGNRIDLRNEPKSSDTEVLAQAAVDAAREAGAKAIVASTASGYTARLISKYRPDMPILAITYDEKVARSLTVNYAVYPVVKDAPETTDDLIELAKKTVHDEKLAKRDDTIVVTAGLPIKKPGTTNLIHVVKL

SEQ ID NO: 1763 - protein, 121 aa, Oenococcus oeni
MAFDKDAIIASLKEASILDLADLVKAIEDEFGVSAAAPVAAAGAAGDDAAAKDSFDVELTEPGQAKIGVIKAVRDATGLGLKESKDLVDGAPSVIKKDLNESDANDLKSKLEAAGATVALK

SEQ ID NO: 1764 - protein, 427 aa, Trichodesmium erythraeum
MEFLKTKNKKNMTNKELKRVVVTGMGAITPIGNTLSEYWDGLLNGKSGVDKITLFDSSKHKCCIAAEVKGFDPLEHMDRKQAKHMDRFTQFAVAASKQTIADAKFEINDLNAEQVGVIIGTGVGGIKVLEDQQEIYLNRGPNKCSPFMIPMMIANMAAGLTAIHTGAKGPNSCTMTACASGSNAIGDAFRLIQRGYAQAMICGGTESPVTPLGLAGFSSVKALSTRNDDPTSASRPFDRDRDGFVMGEGAGILILEELECALSRGARIYAEMVGYGMTCDAYHMTSPVPDGEGATRAIQLAMKDAGLTPAQISYINAHGTSTRANDTTETKAIKKVLGESASQVAISSTKSMTGHLLGGSGGIEAIATVMAIANDKIPPTINLDNPDPECDLDYVPKKSRSQIIEVALSNSFGFGGHNVTLAFKKYR

SEQ ID NO: 1765 - protein, 354 aa, Trichodesmium erythraeum
MVNTQAREDLHIRLEETQLLDRDCTTLSRHVLQQLHFSPDAQDISSLMNRIGLAGKLIARRLTRAGLLEDTLGFTGTVNVQGESVKKMDIYANDVFISVFKQSGLVCRLASEEMEKPYYIPENCPIGRYTLLYDPLDGSSNLDTNLNVGSIFSVRQQEGNDENGLAQDLLQNGHKQIAAGYILYGPSTMLVYSIGQGVHAFTLDPSLGEFILVNENIKIPEHGPVYSVNEGNFWQWDDSMRDYIRYVHRHEGYTARYGGALVGDFHRILYQGGVFLYPGTVKKPEGKLRLLYESAPMGYLVEQAGGRASTGTEEILDVVADQLHQRTPLIIGSKEDVALVESFIKEQKRISNQG

SEQ ID NO: 1766 - protein, 449 aa, Trichodesmium erythraeum
MSKYDSHLKCSFCGKSQEQVRKLIAGPGVYICDECVELCNEILDEELFDSNATGAQPPIPRPAPAPQKRGTGTKRLSISQIPKPREIKNYLDAHVIGQEEGKKVLSVAVYNHYKRLSFLEAKKSGKSSQDEVELQKSNILLIGPTGCGKTLLAQTLADLLDVPFAVADATTLTEAGYVGEDVENILLRLLQVADLEVDEAQRGIIYIDEIDKIARKSENPSITRDVSGEGVQQALLKMLEGTVANVPPQGGRKHPYQDCIQIDTSNILFICGGAFVGLEKIVDQRIGKKSMGFIHQSGDSYQVKEKKVVDLMKQMEPNDLVKFGLIPELIGRIPMVAVVEPLDEETLMAILTKPQNALVKQYQKLLRMDNVKLEFEEDAVRAIAKEAFRRKTGARALRGIVEELMLDVMYELPSRKDVSRCTITKEMVEKRSTAELLLHPSSLPKPESA

SEQ ID NO: 1767 - protein, 133 aa, Trichodesmium erythraeum
MSAKTDEILEQLKSLSLLEASELVKQIEDAFGVSAAAPAGGMMMPMAMPGAPGAAAAEPEEEQTEFDAILTEFPSDKKIAILKVVRSITGLGLKEAKELVESVPKPLKEGIAKEAAEDIKKQLEEAGAKVEIK

SEQ ID NO: 1768 - protein, 816 aa, Trichodesmium erythraeum
MNQQNPIPNIPAISWNRPIGLDWDKPYTVRYSSNIDDGPWHGMPLGGFGAGATGRSPRGDFNLWHLDGGEHIYQNLPACQFSVFEETKGQKQAYALSTELPTDGSLSAWQWYPREKAGLKTGTYHALYPRSWFVYENVFTAQLSCEQFSPILAGNYQETSYPIAIFEWTAHNPTDEAITLSIMLSWQNTVGWFTNSVKTPEVRVRDDGSPVYEYKPRWGESTDNFNLLVEDFHRIGCTMTKLSIADEPAEGEGQMAIATFINAGMEVFYHTRWNPTGTGEDIWHYFALDGSLIDEENELPATEGEQIGVAISVRFTIRPGKNRKIPFFLVWDLPVTDFGNGVSYYRRYTDFYGRNGKNAWSMIRTAMKHYQTWRENIEAWQNPILQREDLPNWLKMALLNELYDLTSGGTIWAAASDSAPYGQFAVLECLDYRWYESLDVRLYGSFGLLILWPELEKSVLVAFARAVSTADDTLRIIGYNQVSAVRKVAGATPHDLGAPNEHPWEMTNYTSYQDCNQWKDLSSDFVLQVYRDFLLTGADDYEFLWQSWSAITETLAYLKGFDKDNDGIPENEGAPDQTFDDWQLRGVSAYCGGLWLAALEAAIAIGKVLIEHPREIPYYPPKGFYSEVDKNSVDAINNQVYLYQGWLKKGLPIYQEKLWNGEYYRLDSESNSEVVMADQLSGQFYAKLLNLEDIVPAECALSALKTVYNSCFKNFHNGKFGAANGVLPDGSPENPNATHPLEVWTGINFGLAAFMVQIGMKKEALEITEVVVGQIYENGLQFRTPEAITVMGTFRASHYLRAMAIWAIYLVIEAKR

SEQ ID NO: 1769 - protein, 271 aa, Trichodesmium erythraeum
GESVKKMDIYANDVFISVFKQSGLVCRLASEEMEKPYYIPENCPIGRYTLLYDPLDGSSNLDTNLNVGSIFSVRQQEGNDENGLAQDLLQNGHKQIAAGYILYGPSTMLVYSIGQGVHAFTLDPSLGEFILVNENIKIPEHGPVYSVNEGNFWQWDDSMRDYIRYVHRHEGYTARYGGALVGDFHRILYQGGVFLYPGTVKKPEGKLRLLYESAPMGYLVEQAGGRASTGTEEILDVVADQLHQRTPLIIGSKEDVALVESFIKEQKRISN

SEQ ID NO: 1770 - protein, 444 aa, Methanosarcina barkeri
MSLAKLRTHYTADVKPEKVDNGQKITLAGWVHEVRDLGGICFVVLRDREGKAQVTLVKKKIDKELFDAARRLVRESVISVTGSVKFEEKAPNGYELLPEEITVLNVANSPLPMDTTGKVEAELDTRLDSRFIDLRRAETTAVFKIRHQALQATREYFVQNGFIETATPKVVATATEGGTALFPITYFDREAFLNQSPQLFKQILMSGGFDRVFEIGPIFRAEEHDTRRHLNEATSIDVEVSFADHFDVMEILENLVAYVYAQVIEKCKPSLETLGIELKVPKTPFLKLTYNEVIEIINARSEEKMHWGDDLGTFGEHIVGNYVYETTGESHYFIIDWPTEIKPFYAMPYEDRPEYSKSFDMMHRTMELSSGAQRIHIPDLLKSRIESQGLNPEGFEFYLKAFEYGMPPHAGWGMGCERFIMTMLGTENIRDTVLFPRDRRRLSP

SEQ ID NO: 1771 - protein, 340 aa, Methanosarcina barkeri
MWRSRMSLGTSDAFDLKSDYIISIINKLGAKIVGFQFPEGLKRKGPKLAKKVEDATGAEIIISGDPCFGACDLDKTLLEQVDILFHFGHAELEDTKFSEKVYFIETRSAVNIRPVVEKSVPELKGQVIGLITTVQHVHKLPEACAVLEANGKTCVIGKGDSRLAYPGQVLGCNFSTARGEVCDEYLYIGSGDFHPLGVALSTKKRVLAADPFSGEVREVDPSRILRQRSAVIAKSLDAEIFGIIVSSKNGQERMELAFSLKELAKKHGKEAHLILIDLVTPDQLLQFKVDAFVNTACPRLAIDEVGRFPSPMLTPQEFEIVLGEREWENLVLDEITEEPV

SEQ ID NO: 1772 - protein, 578 aa, Methanosarcina barkeri
MEVKGEIYRVSGPVVTVTGLQAKMYDLVKVGDEGLMGEVIQILGPKTIIQVYEETAGIKPGEPCYSTGSSLSVELGPGLLSSIYDGVQRPLHVLLERTGGFIGRGVTADGLDHKKLWEFKPVAKKGDSVKGGDVIGVVQETVNIEHKIMVPPDISGTISDIKSGNFTVVDTICTLTDGTELQMMQKWPVRRPRPVRTKLTPTRPLVTGMRILDGLFPVAKGGTAAIPGPFGSGKTVTQQSLAKWSDTEIVVYIGCGERGNEMADVLSEFPELEDPQTGRPLMERTVLIANTSNMPVAAREASVYTGITIAEYFRDMGLDVSLMADSTSRWAEAMREISSRLEEMPGEEGYPAYLSARLAEFYERAGVAESLCGETGSITVIGAVSPPGGDFSEPVTQNTLRIVKVFWALDAKLSQRRHFPAINWLNSYSLYKDSLNDWFADNVAPDYVPLRERAMEMLQTESELQEIVQLVGSDALPDDQQLLLEITRMLREIFLQQNAFHPVDAYSPFAQQYRILKAIMKWGDAAMEALKSGVPVPEILKLESKNVLAKVKYEEKFDESMNAVLTQMDKEFASLRGR

SEQ ID NO: 1773 - protein, 477 aa, Methanosarcina barkeri
MQIPDHKTKIVCTIGPASSSEEVIRKLVLAGMNVARINFSHGSFESHSEVIQRVRKVAEELDRTVAILADLPGPKIRIGKLEKEPIMLHKGNSVTLTVAETTGNETRIPVSYKQLPESVVPGSLIYLSDGFIQLRCLEVSGKDVLCEVLIGGQLYSHKGLNLPGAKILVDSVTGKDLEILGFALSKGIDTFSISFIESAEDIRNVRNFAAARGKSVYIVSKIERRQAVENIQDILKETDALMIARGDLGVEIPIQEVPSVQKELIHSAKLLGIPVITATQMLASMTDNIRPTRAEATDVANAILDGTDAVMLSEETAVGNYPVEAVEMMAKIAKTTEDWRSGTKWGLDAIIKGITARDMSVDEVITLQVHEALQKLPVAAVLTPTRSGATPRRISRFKPDTWILAFSRVPRTCGFLSLSYGVYPITVNENIESWEKETTEKAKDLGFVKSGEIVIFTQGPSSGSPGGTNMLKILTLK

SEQ ID NO: 1774 - protein, 638 aa, Geobacter metallireducens
MSKVIGIDLGTTNSCVAIMEGGEPVVIANSEGSRTTPSMVAFAESGERLVGQQAKRQAVTNPENTLFAIKRLIGRKFDTDEVRKDISISPFKIVKADNGDAWVDVRGKMYSPPEVSAIVLQKMKKTAEDYLGETVTDAVITVPAYFNDSQRQATKDAGKIAGLNVLRIINEPTAAALAYGLDKKKDEKIAVFDLGGGTFDISILELGDGVFEVKSTNGDTFLGGEDFDQRVIDWIADEFKKDQGIDLRGDKMALQRLKEAAEKAKCELSSSMETDINLPFITADATGPKHLTMKLSRAKLEALCAELLDKLEGPCRTALKDAGLSPSEVDEVILVGGMTRMPAVQKRVQEIFGKAPNKGVNPDEVVAIGAGIQGGVLRGDVKDVLLLDVTPLSLGIETLGSVMTKLIDKNTTIPCRKSQVFSTASDNQPAVTIHVLQGEREMASDNKTLGNFELTGIPPAPRGVPQIEVTFDIDANGIVHVSAKDLGTGKEQSIRITASSGLSKEEIDKMVREAESHAADDKKKRELIEARNHADTLAYSTEKSLKEYGDKIGDDEKKKIEEAVAALKKAMEGDDVDAIKQATDALTQASHKLAEAVYAKTQTEGGAQPGAEADGDTGAKGGEKVVDADFEEVKDDKK

SEQ ID NO: 1775 - protein, 314 aa, Geobacter metallireducens
MPFSEPGKTKFQVDLRRHLRNQGICDNLVHLICEIAEASKYVINAVRTGDLGVAGTSNLYGEEQLALDVLSDRIIKKRLIHSGVVCNIASEEMDEIFQAQADADGLYSVAYDPLDGSSLVDVNLAVGTIVSIYEGCNLLQKGRNQVAALYILYGPRVSMVYSVGRGVHEFTMNHLMEFTLSRENIVMQEEGNIYAPGGLRNKYQEGTEQFVRYLEEKGAKLRYSGGFVPDINQVIMKGKGIFMYPALNGSPNGKLRLLFELNAMAYLVENAGGAATDGKQPILDLEPHSLDQRAPVYIGCKADVVKAMEFVSRN

SEQ ID NO: 1776 - protein, 400 aa, Geobacter metallireducens
MENGAISLRKGDPLDIVTDEVLGTPTLISTIYKALPHDVKPGSRILMDDGLIELKVHSVEGNLVRCTVVEGGTLKDLKGINLPGVHVSAPSLSEKDLRDLEFCLAEGVDYIALSFVRSAEDVEGLKRILFERGIHIPVVAKIEKPEALRNFKSILKAADGVMVARGDLGVEISAEKVPLFQKKIIRACNEAGKPVITATQMLESMISHPRPTRAETSDVANAILDGTDAVMLSGETASGQFPLEAVRTMAKVALDVERYAQMEDTLPQRRHNPSIAEAVAEAACRAAVTVDARAISVMTQSGSTAALISKFRPPLPIIAFTQSLETRRRLSLYWGVKPLPIGPMTGTDEQIAAVESTFLSAGYRKGDVIVITMGVPVEARGSTNLMKVHKLGTGKFFEIF

SEQ ID NO: 1777 - protein, 410 aa, Geobacter metallireducens
MRRVVVTGVGAISPLGTGNGKNWDALVAGRSGIDLITRFDASELPVKIAGEVKDFTPEDFIEKKEVKKMDLFIQYALAAAQFAMEDSGLQITDENAERVGVIVGAGLGGLPTIEKYHAAMLEGGYKKISPFFIPMLIINLAPGHISIKYGAKGPNLSSVSACATGTHSIGDAYHMIKRGDADAMIAGGTESTVTPLGIGGFAVMKALSTRNDDPKGASRPFEKSRDGFVLAEGAGIVILEEYESAKKRGAKIYAEVVGYGLSGDAYHLTAPAPEGEGAARCIKMALNNAGINADQVDYINAHGTSTHFNDYYETLAIKKVFGDHAKKIMVSSTKSMTGHLLGAAGGVEAVFSLMAMDKGVVPPTINYQEQDSECDLDYVPNTARDAKITYAMSNNFGFGGTNASLLFKKI

SEQ ID NO: 1778 - protein, 417 aa, Geobacter metallireducens
MSRRNDSSENLTCSFCGKSQDEVKKLIAGPTVYICDECIELCNDIIAEESKLEEAMGPDVKKLPKPREIKDVLDEYVIGQDRAKKILAVAVYNHYKRIESMGKPSDVEMQKSNILLLGPTGSGKTLLAQTLARILRVPFAMADATNLTEAGYVGEDVENIILNLLQAADYDVERAQKGIIYIDEIDKIARKSDSPSITRDVSGEGVQQALLKIIEGTVASVPPKGGRKHPQQEFLKVDTSNILFICGGAFAGLDNIIQQRIGVKTLGFGADVKSKVEKKAGELLTDVTPEDLLKFGFIPEFIGRLPVLATLHELDEAAMVQILKEPKSALVKQYQKLFEMEHVKLKFTDGSLVAIAREALKRKTGARGLRSILENAMLDIMYEIPSQTMVKEVVISEDVIYNREKPIIVYESVAESA

SEQ ID NO: 1779 - protein, 336 aa, Pseudomonas fluorescens
MSRVTLSRYLIEQTRSNNTPADLRFLIEVVARACKEISHAVSKGALGGVLGSMGTENVQGEVQKKLDVLSNEILLEANEWGGHLAGMASEEMDNAYQIPGKYPKGAYLLVFDPLDGSSNIDINAPVGTIFSVLRCPNEYLSQNEALDEKAFLQPGTQQVAAGYAIYGPQTMLVLTLGHGVKGFTLDREMGSFVLTHEDITIPESTQEFAINMSNQRHWEAPVQRYVSELLAGEEGPLKKNYNMRWVAAMVADVHRILTRGGLFMYPRDSREPSKPGKLRLMYEANPMSFLVEQAGGASTDGHQRILDIKPEGLHQRVAVFLGSKEEVARATAYHKE

SEQ ID NO: 1780 - protein, 425 aa, Pseudomonas fluorescens
MQSRHLKKESAVSRRRVVVTGMGMLSPLGTDVPSSWQGILAGRSGIGLIEHTDLSAYSTRFGGSVKGFNVEEYLSVKEARKLDLFIQYGLAAGFQAVRNAGLEVTDANRERIGVAMGSGIGGLTNIEETSRTLHETGPRRISPFFVPGSIINMISGFLSIHLGAQGPNYAIATACTTGTHCIGMAARNIMYDEADVMIAGGAEMAACGLGMGGFGASRALSTRNDEPTRASRPWDKGRDGFVLSDGAGALVLEELEHAKARGATIYAELIGFGTSGDAFHMTSPPADGAGAARCITNALRDAKINVDQVQYINAHGTSTPAGDLAEANAIKSVFGDHAYKLAVSSTKSMTGHLLGAAGAVEAIFSVLAINSQVAPPTINLEEPDEGCDLDFVPHTARNMDIDVVLSNSFGFGGTNGTLAFRRFAG

SEQ ID NO: 1781 - protein, 438 aa, Pseudomonas fluorescens
MLQAYRIWIERMTDTRNGEDNGKLLYCSFCGKSQHEVRKLIAGPSVFICDECVDLCNDIIREEVQEAQAESSAHKLPSPKEISGILDQYVIGQERAKKVLAVAVYNHYKRLNQRDKKADDVELGKSNILLIGPTGSGKTLLAETLARLLNVPFTIADATTLTEAGYVGEDVENIIQKLLQKCDYDVEKAQMGIVYIDEIDKISRKSDNPSITRDVSGEGVQQALLKLIEGTVASVPPQGGRKHPQQEFLQVDTRNILFICGGAFSGLEKVIQNRSTKGGIGFNAEVRSKEEGKKVGESLREVEPDDLVKFGLIPEFVGRLPVLATLDELDEAALMQILTEPKNALTKQYAKLFEMEGVDLEFRSDALKSVAKRALERKTGARGLRSILEGVLLDTMYEIPSQSEVSKVVIDESVIEGKSKPLYIYENSEPAAKAAPDA

SEQ ID NO: 1782 - protein, 496 aa, Pseudomonas fluorescens
MVAALLDRLGVNPALYQNGKVPVHSPIDGSRIGAVNWEGPAEVEQHISRADHAFEQWRKVPAPRRGELVRQFGEVLREYKTELGELVSWEAGKITQEGLGEVQEMIDICDFAVGLSRQLYGLTIASERPGHHMRETWHPLGVVGVISAFNFPVAVWAWNTTLALVCGNPVVWKPSEKTPLTALACQALFERVLKNFSDAPAHLSQVIIGGRDAGEALVDDPRVALISATGSTRMGREVAPKVAARFARSILELGGNNAMILGPSADLDMAVRAILFSAVGTAGQRCTTLRRLIAHESVKEEIVTRLKAAYSKVRIGHPLEGNLIGPLIDKHSFENMQDALEQALSEGGRVFGGKRQLEDQFPNAYYVSPAIVEMPEQSDVVCSETFAPILYVVGYSDFEEALRLNNAVPQGLSSCIFTTDVREAEKFMSAVGSDCGIANVNIGPSGAEIGGAFGGEKETGGGRESGSDAWRAYMRRQTNTVNYSLELPLAQGITFD

SEQ ID NO: 1783 - protein, 716 aa, Azotobacter vinelandii
MPHLCAGPARLRLLLRCGRNACRNTAPSRAGIHPRRHTRRPWPAPDRRSTGRRDLRSSAGGSRSVVRAAAPAGRRRARRRAPRRRRPAAATEPGSGGPAPGRGRTVPGLRPVPRVASGKQGTGLRAAFPSGARTGGGRARPGRGLHPPLPRAADPAAGQVRVRTQAARRQQGGGDPRIHARAAVRRPGAGIHRRRPHRRGRFPGGQRPGWAFVQGRAGRDGRSTAAGLRLGGGKMAGRSGPAPQTGGLSMSRLVVISNRVAPIREGKIAAGGLAVGVYDALRQNGGIWFGWNGEVGQKPETACESAGNITYVTLGLSKPDYNEYYRGFSNATLWPIFHYRIDLARYSREEYLGYRRVNAMLAEKLKPLLRPDDILWVHDYHLIPFAAACRQLGIGNRIGFFLHIPFPTTEVLTAVPPHRDLFQTLCDYDLVGFQTESDRMAFQDYVCRELDGLIGTDGSLTACGRNFRAGVYPIGVMPDDIRRLADSYRGRRPMIGRTAEGKLRKTLISVDRLDYSKGLVERFLAYEQFLEHYPEHRRNVELIQIAPTSRTDVKTYRAIRKQLETVAGHVNGRLADLDWMPLHYLNKSLERRTLMGLFRTANVGLVTPLRDGMNLVAKEYVAAQNPADPGVLVLSRFAGAAHELGAALIVNPYDCLGMAEAMDRALRMPLEERKERYEDMMRALRAADLNAWRDNFLRDLRTFGRHRVVTASRAAV

SEQ ID NO: 1784 - protein, 447 aa, Azotobacter vinelandii
MVTGGGVPRGALIACRQAIEPASRSNEEHEEIALSRRRVVVTGLGMLSPLGTDVPSSWQGVLAGRSGIAPLEHMDLSAYSTRFGGSVKGFDVEQYLSLKEARKLDLFIQYGLAASFQAVRDSGLEITDANRERIGVAMGSGIGGLTNIENNCRSLIEQGPRRISPFFVPGSIINMISGFLSIHLGLQGPNYALATACTTGTHCIGMAARNIAYGEADAMVAGGAEMAACGLGIGGFGAARALSTRNEEPARASRPWDKGRDGFVLSDGAGALLLEELEHAKARGATIYAELVGFGMSGDAFHMTSPPEDGAGAARCMRNALRDAGLNVDQVQYINAHGTSTPAGDLAEVAALKSVFGESVYRLSVSSTKSMTGHLLGAAGAVEAIFSILAIRDQVAPPTINLDEPDEGCDLDFVAHEAKRLPIEVVLSNSFGFGGTNGSLVFRRFAD

SEQ ID NO: 1785 - protein, 426 aa, Azotobacter vinelandii
MTDTRNGEDNGKLLYCSFCGKSQHEVRKLIAGPSVFICDECVDLCNDIIREEVQEAQAESSAHKLPAPKEISTILDQYVIGQERAKKVLAVAVYNHYKRLNQRDKKDDVELGKSNILLIGPTGSGKTLLAETLARLLNVPFTIADATTLTEAGYVGEDVENIIQKLLQKCDYDVEKAQMGIVYIDEIDKISRKSDNPSITRDVSGEGVQQALLKLIEGTVASVPPQGGRKHPQQEFLQVDTRNILFICGGAFSGLEKVIQNRSTKGGIGFNAEVRSPDVGKKIGEALRDVEPDDLVKFGLIPEFVGRLPVIATLDELDEAALVQILTEPKNALTKQYGKLFEMEGVELEFRPDALRAVALRALERKTGARGLRSILEGVLLDTMYEIPSQSGVSKVVIDESVIAGASKPLLIYENVEPPAKAAPDA

SEQ ID NO: 1786 - protein, 337 aa, Azotobacter vinelandii
MSRVTLSRYLIEQTRSHNTPADLRFLIEVVARACKEISHAVSKGALGGVLGSMGTENVQGEVQKKLDVMSNEILLEANEWGGHLAGMASEEMDSAYQIPGKYPKGAYLLVFDPLDGSSNIDVNVSVGTIFSVLRCPDQYLTQNDSLNEQAFLQPGTQQVAAGYAIYGPQTMLMLTLGNGVKGFTLDRELGSFVLTHDNLCVPETTAEFAINMSNQRHWEPPVKRYVDELLAGKTGPLDKDYNMRWIASMVADVHRILTRGGIFMYPRDAREPSKPGKLRLMYEANPMSFIIEQAGGAATNGTQRILDIQPESLHQRVAVFLGSKAEVERITDYHLEG

SEQ ID NO: 1787 - protein, 454 aa, Novosphingobium aromaticivorans
MSDPVIVWFRRDLRLADQAALLAAAAEGPVIPVYILDDDTPRHCRMGGASRWWLHHSLAELDASLRKLGSRLILRRGKCHEELAAVRREAGARVVHALQHYEPWWRNAEKAVAKTIRLVLHEGNYLAPAGSVRTGMGRPYKIYTPFWHALLERMPPAPPLPAPERLEAPAVWPTSDALDDWKLLPTAPDWAGGFRETWTPGENGAEERLQDFADRVARYGETRNLPSIEGTSRLSPHLHFGEISPATIWHRVVNAGGSVDVFLGELGWRDYAQNVIVQFPDYGSRNAREAYDRLEWRDDPEALRAWQQGRTGYPIVDAGMRELWHTGWMHNRVRMIAASFLVKHLLIDWREGERWFWDTLVDADYASNAVNWQWTAGTGVDSNMFVRIMAPLTQSPKFDAAGYIRQWVPELAHLSDRDIHDPAVPPRGYPAKIVSHSEARARALAAHDRMKQPA

SEQ ID NO: 1788 - protein, 418 aa, Novosphingobium aromaticivorans
MTKLSGSDTKSTLYCSFCGKSQHEVRKLIAGPTVFICDECVELCNDIIREETKAGIAGKKDGGVPTPRDIFETLNDYVIGQDRAKRVLSVAVHNHYKRLKHSGKGGDVELSKSNILLVGPTGSGKTLLAQTLAKTFDVPFTMADATTLTEAGYVGEDVENIILKLLQASDYNVEKAQHGIVYIDEIDKISRKAENPSITRDVSGEGVQQALLKLMEGTTASVPPQGGRKHPQQEFLQVDTTNILFICGGAFAGLEKIIADRLQKRSIGFGAHVADPDKRKVGELLQKAEPEDLLKFGLIPEFVGRLPVIATLNDLDIEALVKILKEPKNALVKQYAKLFELEDVTLTFTDDALEAIAKKAIERKTGARGLRSIVEGLLLDTMFDVPTESDIAEIVVDKDVVEGRKEPVRVLKGKEEAA

SEQ ID NO: 1789 - protein, 621 aa, Novosphingobium aromaticivorans
MAKVIGIDLGTTNSCVAVMDGGTPKVIENSEGARTTPSIVAFTKDGERLIGQPAKRQAVTNPDNTIFAVKRLIGRRFDDPMTQKDTELVPYTITKGKNGDAWVKAGGQDYSPSQISAFTLQKMKETAEAYLGETVTQAVITVPAYFNDAQRQATKDAGQIAGLEVLRIINEPTAAALAYGLDKQDGKTIAVYDLGGGTFDISILEIGDGVFEVKSTNGDTFLGGEDFDTAVVEYLADKFKAKEGMDLKTDKLALQRLKEAAEKAKIELSSAQTTEINLPFITARMEGGATTPLHLVETVTRADLEKLVAGLIQRTLDPCKKALADAGISAKEIDDVVLVGGMTRMPKVREVVKDFFGKEPHTGVNPDEVVAMGAAIQAGVLQGDVKDVLLLDVTPLSLGIETLGGIMTKMIDRNTTIPTKKSQVYSTAEDNQQAVTIRVFQGEREMAQDNKLLGQFDLVGIPPARRGVPQIEVTFDIDANGIVNVSAKDKGTGKEQQIRIQASGGLSDADIDQMVRDAEKFAEEDKKRRAAAEAKNNAESLIHATERQLEENGDKVDAGLKAEIEAAIAEAKTAVESGDIDAMNAKAQALTDKAMKMGQAIYEKEQATGGFSGCRSPEGRR

SEQ ID NO: 1790 - protein, 123 aa, Novosphingobium aromaticivorans
MADIAKLVEELSKLTVLEAADLAKALEEAWGVSAAAAVAVAAAPAAAAEAAEEKTEFDVILTGDGGKKIQVIKEVRAITNLGLTEAKALVEGAPKAIKEGVSKAEAEDIKKKIEEAGGTVEVK

SEQ ID NO: 1791 - protein, 421 aa, Desulfitobacterium hafniense
MAKYNDEKNQLKCSFCGKTQDQVKKLVAGPGVYICDECIELCNEIIEEELNEDLGMEIGDIPKPKEIRAILDQYVIGQDEAKKALAVAVYNHYKRINLGMKIDDVELQKSNIVMLGPTGSGKTLLASTLAKVLNVPFAIADATSLTEAGYVGEDVENILLKLIQAADYDVEKAEKGIVYIDEIDKIARKSENPSITRDVSGEGVQQALLKILEGTVASVPPQGGRKHPHQEFIQLDTTNILFIVGGAFDGIDKIIQNRIGKKVMGFGAEIKKKSEQNIGETLRELLPADLLKFGLIPEFVGRLPVMVKLDALDEEALVRILTEPKNALVKQYEKLLELDGVALEFKEEALKAIAEEAIRRNTGARGLRAIVEEIMQNVMYDLPSRNDVTKCVVTKDVILKKEEPLLVTIDKSKKNKKEESA

SEQ ID NO: 1792 - protein, 241 aa, Desulfitobacterium hafniense
MDKISRKSDNPSITRDVSGEGVQQALLKLIEGTIASVPPQGGRKHPQQEFLQVDTRNILFVVGGAFAGLDKIIQQRSTEAGGIGFGAKVKSAERKIDIGKILADVEPEDLIKFGLIPEFVGRLPVVATLEELDEPALISILTEPKNAITKQFRKLFEMENVELEFRPDALSAIAKKALKRKTGARGLRTIVESVLLDTMYELPSLENVSKVVVDESVIEHKSEPYLIYQTPPAQPKVASAE

SEQ ID NO: 1793 - protein, 345 aa, Desulfitobacterium hafniense
SVPDRRVIHYGVAASLMALQDAGIVVDDSNAERIGALVGSGIGGLLGIEEQTVKYHEGGPRKISPFYVPSTIINMLPGQISLITGAKGPNFSAVSACATSNHSIGMAMRMIQYGDADVMVAGGAERGSSPTSVGGFCSMKAMSTRNDDPTRASRPWDKDRDGFVLGDGAGILILEEYERAKARGARIYCELAGFGASSDAFHMTAPSENGEGPARCMVSALKDAGINPDQVGYLNAHGTSTPLGDLAETLAMKRAFGDHAYKMMVSSTKSMTGHLLGAAGGAEAIFSVLALHDGIIPPTINLDEAGEGCDLDYVPNVARETKIDVAVSNGFGFGGTNGTLVFKRI

SEQ ID NO: 1794 - protein, 132 aa, Desulfitobacterium hafniense
MILGRKISMSKTAEILEAVKGLTVLELAELVKAFEEEFGVSAAAPVAVAAAPGAAAAPVAEEQTEFDVVLMNAGAGKINVIKVVREITGLGLKEAKELVDGAPKPVKEKVSKDDAEAIKAKLVEAGATVEVK

SEQ ID NO: 1795 - protein, 596 aa, Prochlorococcus marinus
MSNIDLKRRTKIVATIGPATQSEEIITDLIKAGVTTFRLNFSHGDHKDHQERIQTIRKVSEKLDLDIGILQDLQGPKIRLGRFKDGPVKVKKGDKFSLTSNEVECTKSIANVTYNKLAQEVTSGKRILLDDGKIEMIVEKVDIGNNLLECKVTVGGVLSNNKGVNFPDVQLSVKALTDKDIEDLEFGLTAGVDWIALSFVRNPSDINEIKNLINKNGHSIPVVAKIEKFEAIDQIDSILPLCDGVMVARGDLGVEMPAEEVPLLQKELIRKANTLGIPIITATQMLDSMASNPRPTRAEVSDVANAILDGTDAVMLSNETAVGDYPVEAVETMATIARRIERDYPLKAIESHLPSTIPNAISAAVSNIARQLDAGAIIPLTKSGSTARNVSKFRPPTPILATTTERCVARRLQLVWGVTPLLVKNDDRTAKTFSIAMQIAQELGILKQGDLVVQTAGTLTGISGSTDLIKVGLVRKVVTRGISVGEIGVTGKARNIKTNLDLSLISPGEILFVPKNILMDLPFTKIITGIVTDENIDECYKVFKKNNIKISTICNLSAIDNLVSNGDLITLQLNEGVVYMGQIEDDEDALDKYKYV

SEQ ID NO: 1796 - protein, 414 aa, Prochlorococcus marinus
MPNFHRVVITGIGAVTPIGNNIDEYLLGLQKGSNGVSDITLFNPEQHPCKFAAEVKNLQSENFIEPKESKRWDRFSQFGVIAAKQAFNDSGLEITEDNESRIGVIIGSGVGGLLTMESQAQILSHKGPKRVSPFTVPMMIPNMATGLAAIALGAKGPSSAVSTACAAGSNAIGDSFRLLQLGKADAMICGGAEASITPLGVAGFASAKALSFRNDSPQTASRPFDAERDGFVIGEGSGILVLETFESAKKRGAKIYAEIIGYGSTCDAHHITSPSPGGTGGAEAIKLAIDDSSINLDQVDYINAHGTSTTANDKNETSAIKSIFKDRSYLIPVSSTKSMTGHLLGGSGGIEAVACILSLTHNFVPPTINYVNPDPDCDLDYVPNNARDAQIRVALSNSFGFGGHNVCLAFSKLD

SEQ ID NO: 1797 - protein, 130 aa, Nostoc punctiforme
MSAATDQILEQLKTLSLLEASELVKQIEEAFGVSAAAPVGGMMMMAGPGGAAPAEEAVEQTEFEVILDSVPADKKIAVLKIVRELTGLGLKEAKDLVEAAPKAVKEGIAKDAAEDAKKRIEEAGGKVTIK

SEQ ID NO: 1798 - protein, 589 aa, Nostoc punctiforme
MQLRDSLRRTKIVATIGPATSSPEMLKAIIEAGATTLRLNFSHGTHADHQRSIRLIRQTAFELNQPVAILQDLQGPKIRLGKFDNGSIVLAKGDRFTLTNRPVVGTQEISCVTYDYLAEEVPVGAKILLDDGRVEMVVEEINRDKGDLHCRITVPGKLSNNKGVNFPGVYLSIKAMTDKDREDLMFGLDQGVDWVALSFVRNPQDMIEIKELISSTGKQVPVVAKIEKHEAIEQMEAVLALCDGVMVARGDLGVELPAEDVPVLQKRLIATANRLGIPIITATQMLDSMVSNPRPTRAEVSDVANAILDGTDAVMLSNETAVGSFPVEAVATMARIAERMEQEEAQHLNLRSVRDSRRSIPNAISQAVGQIAEQLGAAAIMTLTQTGATARNVSKFRPNTPILAVTPHVNVARQLQMVWGVKPLLVLGLPSTGQTFQAAINVAQELKLLSEGDLVVMTAGTLQGISGSTDLIKVEVVTAVLGHGIGLGQGLVSGRARVANTGMDVSNFNPGDILVAPRTSADFVEAIRKSAGIITEEESLTSHAAVIGLRLGVPVIVGVKQATQVIRDGAIITLDLQRGLIYSGAVRTP

SEQ ID NO: 1799 - protein, 476 aa, Nostoc punctiforme
MRRTKIICTVGPATSAPENLRGLVEAGMNVARLNFSHGAYEFHAQTAHYLRQISNEQQKPIAIMQDLCGPKIRLGTLPPEGLNLEAGTEVTFVLQEKGESIDELPLPLPTLFAMVRPGEPILINDGRVKLIVTDRDADRIRAQVKTGGLISTHKGVNLPQTPLPVSSITEKDLLDLRFGIQLGVDWVAVSFVQSPQDLEPAKRMIEAAGASIRLIAKIERAEALENFDSILKVADAIMIARGDLGVEVPIHEVPLIQKDIIRRCNRAGKPVITATQMLESMISAPDPTRAEATDVANSILDGTDAVMLSGETAVGQYPIAAVQMMHNIAVRTEQALDEGSKHAWCHEAGSLSVTESVAESVCRIAYETGSRAILCNTSSGNTARMVSKYRPTSPIIALTSDITAYRQLALSWGVEALLIPPVHHAEEMFTNVVNTVVDMGLANKGDKVVITSGVPIGKSGTTSLIKVHSIGQPISA

SEQ ID NO: 1800 - protein, 801 aa, Nostoc punctiforme
MTNQLSPKIPSCTWSRPIGLGWDKPYTVRYASNIDDGPWHGMPLGGFGAGCIGRSSRGDFNLWHIDGGEHTFKNVPACQFSVFESNGTSTQAYALSTQGPNDGALKAWQWYPTLPSTEGTGNYHALYPRSWFVYENIFQAQLTCEQFSPVWAGNYQETSYPVAIFLWNAHNPTNAPITLSIMLTWQNMVGWFTNALKSPEVRVRDDGSPVYEYQPRWGESQGNYNQIVENPQQFGCLLSRVGSDALQEGDGTWCIATLKHPQVEIFYHTRWNAEGTGDEVWQSFAKDGSLSNYIDANPVGEGEQLGAAMALRFTLQPGETLEIPFVLAWDLPITEFAAGVNYYRRYTDFFDRSGNNAWAIASTALQEYQTWRSQIQTWQQPILDREDLPNWFKMALFNELYDLTSGGTLWSAASELDPIGQFAVLECLDYRWYESLDVRLYGSFALLMLFPELEKSVMRAFARAIPQGDDTPRIIGYYMTIKAESPIAVRKVAGATPHDLGAPNEHVWEKTNYTSYQDCNLWKDLGSDFVLQVYRDFLLTGADDVEFLADCWNAIVQTLDYLKTFDLDGDGIPENSGAPDQTFDDWRLQGVSAYCGGLWLAALEAAIAISDLLLTHKLGDLGGLAVQKSIYETWLQQSLPIYQEKLWNGQYYQLDSQSGSDVVMADQLCGQFYARLLDLPDIVPSDRALSALKTVYDACFLKFCNGEFGTANGVRPDGSPENPKATHPLEVWTGINFGLAAFLVQMGMKDEALRLTQAVVQQIYENGLQFRTPEAITAAGTFRASTYLRAMAIWGIYLVIN

SEQ ID NO: 1801 - protein, 356 aa, Nostoc punctiforme
MAAENIKMAKTPESLESSINEITDRALDRDCTTLSRHVLQQLQSFSPDAQDLSALMNRIALAGKLVARRMSRAGLMEGVLGFTGEVNVQGESVKKMDVYANDVFISVFKQSGLVCRLASEEMENPYYIPENCPIGRYTLLYDPIDGSSNTDNNLSLGSIFAIRQQEGTDSDGKATDLLANGRKQLAAGYILYGPCTMLVYTIGKGVHSFVLDPSLGEFILTEENIRIPNHGSVYSVNEGNFWQWEESIREYIRYVHRTEGYSARYSGAMVSDIHRILVQGGVFLYPGTIQNPEGKLRLLYETAPLAFLIEQAGGRATTGLVNILDVVPKKLHQRTPLIIGSKEDVAKVESFIQNGH

SEQ ID NO: 1802 - protein, 837 aa, Prochlorococcus marinus
MALFGFSAFRSLLKRGSSLKPWSVPAASWSRAFGLPWQQPYTVRYASNLDDGPWHGMPLGGFGAGCIGRSPRGDFNLWNLDGGEHWQGSIPDCQFALFERQGDQVRAHALATAPQTDDSQPELDKPLSSWSWYPASTEQRKTGSYSARYPLSWTHYKGVFAAELVCEAFSPILPGDYRRTSYPLAVFRWQLQNPTSQSLELSLLLSWRNTCGWFTNTDPSASVHFRDDGSPEHSYVPAIGRGEGQCNRWIDQPGLIGVLMEGERADPLAEGQGQWCLAVPDHLPGVEVMRCSRWDPSGDGSELWSSFASEGTIPNSNTAHKSLAGEQTSAALAVKVTLAPGESLEIPVVISWDLPVTAFATGVRDLRRYTDFHGSDGQAAAALAAEALSDWSDWREQIDAWQAPVLAREDLPERLRMALFNELYDLASGGSLWTAARPGDPVGRFGVLECFDYAWYESLDVRLYGSLALLQLWPELDKAVLRSFARAIPAADATPRPIGWYFTQGRGRVEAPRKRAAATPHDLGAPNESPFDATNYTAYQDCNLWKDLASDYVLQVWRTFLLSPNGEDLSFLAECWPAVVQALSYLKRFDVNHDGLPDNGGAPDQTFDDWPLQGVSAYCGALWIAALEAALAMAQRLQLDLGLNTAEEQHQFSGWLEQSRVNFDRLLWNGEYYKIDAESGTPVVMADQLCGDFYARLLGLPSVVADERSRSSLNAVKEACFEGFEGGRLGVANGLCRDGMPLDPKGTHPLEVWTGINFGLAAYYRLMGDATTATAICSAVVNQVYGGGLQFRTPEAITAVKTYRACHYLRAMAIWALWATHTDWQLIPGAERAGSEW

SEQ ID NO: 1803 - protein, 605 aa, Prochlorococcus marinus
MVVSAMFQVPLMAQIDLTRRTKIVATIGPATESAERIRELVEVGATTFRLNFSHGDHDEHAKRISTIRQVSDELGMHIGILQDLQGPKIRLGRFDKGPITLANGDSFALTSKQVQCNQSVATVTYDKLADEVTTGSRILLDDGRVEMKVLKIDQSEQTLHCIVTVGGVLSNNKGVNFPDVQLSVRALTEKDRQDLAFGLQQGVDWVALSFVRNPSDMKEIRKLIRDHGHSTPVIAKIEKFEAIDQIDSILPLCDGVMVARGDLGVEMPAEEVPLLQKDLIRKANSLGIPIITATQMLDSMASSPRPTRAEVSDVANAILDGTDAVMLSNETAVGDYPVEAVQTMATIARRIERDYPQRPIETYLASTISNAISSAVSSIASHLNAAAIVPLTESGATAHNVSKFRPAAPILAVTNKLAVARKLQLAWGVTPLLVPTQKSTTATFSDAIAVAQELGLLKEGDLTIQTAGTLAGVSGSTDLVKVGIVSAVLGQGIGIGNGTVSGKVRFAFSPNDSTKIEPGEILVIHETSDDYLDAIRKSAGVITEQEGEEYHAEMISKRLGIPFIIGIAHATRNLLEGEVVTMQLSNGKVHRGTGGKLPMKLDSMD

SEQ ID NO: 1804 - protein, 179 aa, Prochlorococcus marinus
MPWLPRLLWVSTRFLPALPGHFISTPRVARAERLRFDYFSLICCLIQTMSKKTDDILDSLKTLSLLEASELVKQIEDAFGVSAAASAGVVVAAGGAAGGGAAAEAAEEQTEFDVVLESFDASAKIKVLKAVREATGLGLGDAKAMVEAAPKTIKEGIAKNDAEALKKAIEEVGGKVSLK

SEQ ID NO: 1805 - protein, 495 aa, Synechococcus sp.
MVVSARILSLGMGQFDQNRRTKIVATIGPATESSERIKELVQAGATTFRLNFSHGDHSEHAARISTIRQVSEELGINIGILQDLQGPKIRLGRFAEGPITLANGDSFSLTSRPVSCNQSIATVTYDKLADEVTAGSRILLDDGRVEMKVEQVDQAEQTLHCTVTVGGVLSNNKGVNFPDVQLSVRALTDKDKVDLEFGLSQGVDWVALSFVRNPSDMEEIRGLIREHGHETPVVAKIEKFEAIDQIDAILPLCDGVMVARGDLGVEMPAEEVPLLQKELIRKANSLGIPIITATQMLDSMASSPRPTRAEVSDVANAILDGTDAVMLSNETAVGDFPVEAVQTMATIACRIEKDYPQRSVDSHLASTVPNALSGAVSTIASQLNASAILPLTKSGATAKNVSKFRPASPILAITPDPTVACRLQLVWGVKPLVIPQHELTTHTFLAAMTQAKTMGLLKEGDLVVQTAGTHTGVSGSTDLVKVGIVSSEEAPVNMI

SEQ ID NO: 1806 - protein, 833 aa, Synechococcus sp.
MAPFGLSALRSLLGRGVGNTPWQPPESSWSRRFGLGWESPYTVRYASNLDDGPDHGMPLGGFGAGCLGRSPSGAFNLWNLDGGEHWFGSIPDCQFALWEQQGEDVRAHALATAPDRDDTDPSGGTPLSAWQWYPASTQGRSTGTYAARYPLSWTHHEDVYRAGVLCEAFSPILPGDYQRTSYPVAVFRWQFSNPTDQPLELSLMLCWRNTVGWFTNTDAAAEVHFRDDGSPEHNYAPAIGRGEGQRNRQVDQPGFSGVLLEGQPSMPLAEGEGQWCLALPDDLDGVHVMRCSRWDPSGDGSELWTPFAADGRIPDSNNDRASRSGEQASAAIAVKFTLAPGASREIPLVISWDLPVTAFASGSSALRRYTDFFGSSGSNAAAIAAEALRDWRQWREQIDAWQQPVLARMQLPEPLRMALFNELYDLCSGGSLWTAASPADPHGRFGVLECLDYAWYESLDVRLYGSLALLQLWPELDKAVLRSFARAIPAADGSQRPIGWYFTQGRGRVEADRKVAGATPHDLGAPNERPFDATNYTAYQDCNLWKDLASDYMLQVWRTFRLAPTGEDLRFLAECWPSAVQALDYLKGFDVNNDGLPDNGGAPDQTFDDWPLQGVSAYCGALWIAALEAALAMAQRLQLDLGLDTAAEQRRFGAWLEQSRANFDDLLWNGEYYRIDAESGTPVVMADQLCGDFYARLLGLPPVVSDARARSTLQAVKEACFERFESGRLGVANGLRRDGSPLDPNGTHPLEVWTGINFGLASYYRLMGESKTALAICSAVVGQVYSGGLQFRTPEAITAVNTFRACHYLRAMAIWGLWATDTGWERIPGVAER

SEQ ID NO: 1807 - protein, 346 aa, Cytophaga hutchinsonii
MERNLSTVKTLVQFITESQKHVFGASGDLSKILNDIAVAAKIINREVNKAGLLDILGMEGGMNVQNEEVKKLDVYANDQFISALRSGGQCCAIASEENTDIIPIENNGHSKSNYVVLIDPLDGSSNIDVNVAIGSIFSIYRRVSESGPGETVDCMQVGNKQVAAGYIIYGSSTMMVYTTGDGVNGFTLDPSIGEFCLSHPNLKIPEDGFIYSVNEGNYADFPREIQEYIYYCKTPDFETSRPYSSRYIGSMVADFHRNLIKGGIFMYPATAKYPLGKLRLMYECNPLAFIVEQAGGKAIDGEGRILDIEPTNIHQRTGIIIGSKNMVEKVEAFIQMNVGLNVYRLK

SEQ ID NO: 1808 - protein, 470 aa, Cytophaga hutchinsonii
MVNKKTKIIATVGPACNTKEKLWELVQAGANIFRLNFSHGTHDVHQGVINAIRELRKEHNVNIAILQDLQGPKIRTDEVENNGVELVAGAQIVITKEKMLGTKDKISTSYKMLTSDVKKGDAILIDDGNIELKVLETGNGEVTCVVIYGGILKSRKGINLPNTIVSEPSLTDKDKEDLLFGLKNEVDWIALSFVRSAVDLNELKAIIAEHGKSCKVIAKVEKPEAVKDIDAIIEASDAIMVARGDLGVELQMEDVPMIQKMIIKKCNQLAKPVIVATQMMESMITNARPTRAEASDVANAIIDGTDTIMLSAETASGNYPVITVKAMTRICQAVEKEADIYNKSTLDDITNTSDSVIASACELADKVNAKAIIGLSQSGYSAFRIASHRPKASIYIATHDEQLMNQMNLVWGVQAFRFEKFTTTDESIEAVKKSLVEKGLLKKGDIYVTTASMPMADIQLANSLKLGIVE

SEQ ID NO: 1809 - protein, 411 aa, Cytophaga hutchinsonii
MAQQTCSFCERPKKDVLLMITGIHANMCDKCITQSYQILQEELKQKGKSEGAPKFNLIKPAKMKSHLDQYVIGQDEAKKVMSVAVYNHYKRLMQSKINEDDDVQIEKSNIIMVGETGTGKTYLARTLAKILQVPFCIADATVLTEAGYVGEDVESILTRLLQAANYDVDAAQRGIVYIDEIDKIARKSDNPSITRDVSGEGVQQALLKLLEGSIVNVPPQGGRKHPDQKMIAINTENILFICGGAFDGIARIIANRLNTQPIGFKTKDDEDDIDAENLLQYVTALDLKTFGLIPELIGRLPLVSYLDPLNEEMLLEILTQPKNAIVKQYKKLFDMEGISLTFEPEALQFIVEKAMAFKLGARGLRSICEAIMTDAMFDLPSEEIKQASFVINYEYAKEKLDRSKFRKLKAA

SEQ ID NO: 1810 - protein, 513 aa, Cytophaga hutchinsonii
MTQLPVKEIFDAFNIQKQNASAMSAGQTWHSNETFLKSSPINGELLATVEYASKETYNALIEKAQEAFPVWSALPAPKRGEIIRQIGDAFREKKQELGALITIETGKLLQEGLGEVQEIIDVCDFAVGLSRQLYGLTMHSERPDHRMYEQYHPLGIVGIISAFNFPAAVWSWNAIIGAVCGNVCIWKPSEKAPLSAIACQSVVSEVIKKNGLPEGIFTIYQGAAAQGSWMADDERVALVSATGSVAMGKKVNQAVAGRLGKVLLELGGNNAIIVTEKANLDMATRAIVFGAVGTAGQRCTTTRRLIVHESIYKKLVDDLTRIYAQLSIGSPLDADTLVGPLIDETAVELYEKRIATAQKEGAVLVTGGKRMQPKGFEKGTYVLPAILEADGAIPSIQEETFAPILYISKYTGHVENAIKMNNGVRQGLSSAIFTGDLQQMERFLSNKGSDCGIANVNIGTSGAEIGGAFGGEKETGGGRESGSDSWKAYMRRQTNTINYGNTLPLAQGIKFDL

SEQ ID NO: 1811 - protein, 733 aa, Cytophaga hutchinsonii
MNDEKRLIIVAYRIPFKVTFKESGERVLQQNSGGLVSAILSLAEKGDVFGKNQKIHWFGYSTPDILQEGETQVENENFIVHPVLIEDALNDAYYEGFCNSTIWPISHYYPYLTSFNEEDYEAYVKANKIFADQINAFIRPGDMVWIQDYQLMLLPGMLRSENPDASIGYFHHIPFATFEIFRLLPKQWQTELLKGMIGADLVGFHTNDYSQYFLRSVQRVLGYDTTARDISIPNRIVRVDTFPISIDYNKFQELYNDPGVIEKRKEFLKDLSAEKNIFSVDRLDYSKGLIHRLNGFEYFLDQYPQWHTRVVLTMIVVPSRETILKYAEMKHELEEAVGRINGKYGTLGWRPVIYLYRSLSFEELGALYTLADVALITPIRDGMNLVAKEFVATRTDKKGVLILSEMAGASLELNGAILINPTDKRTLAAAIIQALTMDEQEQTQRMQMMQDRIRVYDIFKWTEDYMDQLDIIKLKQMEFEEKIINQDVLKSFKQIFDESSRRLFLLDYDGTLSPIVPDPSSSKPSVGIVDVLKKLSSDFNVNVAIISGRDKEFLNYIFDPNTILSAEHGAFLRIPGQDWELQYDYNDQWKRSVLPVFQKYTDRCAGSFIENKSTSLAWHYRNTEKEYAHIRSREFIEELENKVGIKSNLAIIDGDKVIEMKPSDVDKGIAARKICDLYQPDFILSIGDDRTDEDMFKALPDNALTIKVGVKNSSAKFTIKTQEEVMTILNTFL

SEQ ID NO: 1812 - protein, 123 aa, Cytophaga hutchinsonii
MADLKAFAEQLVNLTVKEVNELASILKDEYGIEPAAAAVVVSGGGDAAAAVEEKTAFDVILKSAGASKLAVVKLVKDLTGLGLKEAKDLVDGAPKPVKEGASKDEAEAIKKQLEEAGAEVEIK

SEQ ID NO: 1813 - protein, 125 aa, Helicobacter pylori
MAISKEEVLEYIGSLSVLELSELVKMFEKKFGVSATPTVVAGAAVAGGAAAESEEKTEFNVILADSGAEKIKVIKVVREITGLGLKEAKDATEKTPHVLKEGVNKEEAETIKKKLEEVGAKVEVK

SEQ ID NO: 1814 - protein, 446 aa, Helicobacter pylori
MNETLYCSFCKKPESRDPKKRRIIFASNLNKDVCVCEYCIDVMHGELHKYDNSLLALKRDRLRRMESSAYEEEFLLSYIPAPKELKAVLDNYVIGQEQAKKVFSVAVYNHYKRLSFKEKLKKQDNQDSNVELEHLEEVELSKSNILLIGPTGSGKTLMAQTLAKHLDIPIAISDATSLTEAGYVGEDVENILTRLLQASDWNVQKAQKGIVFIDEIDKISRLSENRSITRDVSGEGVQQALLKIVEGSLVNIPPKGGRKHPEGNFIQIDTSDILFICAGAFDGLAEIIKKRTTQNVLGFTQEKMSKKEQEAILHLVQTHDLVTYGLIPELIGRLPVLSTLDSISLEAMVDILQKPKNALIKQYQQLFKMDEVDLIFEEEAIKEIAQLALERKTGARGLRAIIEDFCLDIMFDLPKLKGSEVRITKDCVLKQAEPLIIAKTHSKILP

SEQ ID NO: 1815 - protein, 222 aa, Secale cereale
SHAAEVTAGYYNLHDRDDYRPIARMLTRHHASLNFTCAEMRDSEQSSQAMSAPEELVQQVWSAGWREGLNIACENALPRYDPTAYNTILRNARPHGINHSSPTEHKLFGFTYLRLSNQLLEGQNYVNFKTFVDRMHANLPHDPSVDPVAPLQRSGPEIPIEVILQAAQPKLDPFPFEDHTDLPVQCLGGIGGGEVECPAGGIGGEVQQDPTGGMGGELPPAV

SEQ ID NO: 1816 - protein, 332 aa, Arabidopsis thaliana
MSNVIGDRTEDGLSTAAAASGSTAVQSSPPTDRPVRVYADGIYDLFHFGHARSLEQAKLAFPNNTYLLVGCCNDETTHKYKGRTVMTAEERYESLRHCKWVDEVIPDAPWVVNQEFLDKHQIDYVAHDSLPYADSSGAGKDVYEFVKKVGRFKETQRTEGISTSDIIMRIVKDYNQYVMRNLDRGYSREDLGVSFVKEKRLRVNMRLKKLQERVKEQQERVGEKIQTVKMLRNEWVENADRWVAGFLEIFEEGCHKMGTAIVDSIQERLMRQKSAERLENGQDDDTDDQFYEEYFDHDMGSDDDEDEKFYDEEEVKEEETEKTVMTDAKDNK

SEQ ID NO: 1817 - protein, 478 aa, Emericella nidulans
MNENDENGPSTRLTRAKAAALTTDAPAANGALKKPLQTKKAATGANGTQRKRAALGDVSNVGKADNGETKDAKKATSKTGLTSKATMQSGGVQKLSRSNLSRTAVGAKDNNVKKPATEAKRPGSGSGMGSAMKRTSSQKSLQEKTIQQEEPPRKKVDIEKVVEKQAEAVSVKGDVKAGAQTEELEKPQDFVADLDTEDLDDPLMAAEYVVEIFDYLRELEMETLPNPDYIDHQPDLEWKMRGILVDWLIEVHTRFRLLPETLFLAVNIIDRFLSAEVVALDRLQLVGVAAMFIASKYEEVLSPHVANFSHVADETFSDKEILDAERHILATLEYNMSYPNPMNFLRRISKADNYDIQTRTLGKYLMEISLLDHRFLGYPQSQIGAAAMYLARLILDRGPWDATLAHYAGYTEEEIDEVFRLMVDYLHRPVCHEAFFKKYASKKFLKASIMTRQWAKKYHHLYIDSALTEPYNSIKDNE

SEQ ID NO: 1818 - protein, 482 aa, Oryza sativa
MAQPSPTTGTLPFLMASNAKSTIPSATKMDEDCTFGNDTFSFQPHVGSRRPNFSASEKGPNACHQNQSLSNIHQRESSLQSSFTAVKDITDEKNIKTKTSDSMFGDNHSSDEQDDETNQNGENFMPPLNHRSGVPLSHTNDPEVNVLENRGSQTCHNSASLWDNAKNDCLQDVQSEVIETRTAACLPVSTNCDTSIMESQDAVDVSSTLSNEEDDRATHGTASIECNGDGDETDSKRRKLDALTAATAAITTTSNIDMGAAASRGVREPRVVVQTTSEVDILDDGYRWRKYGQKVVKGNPNPRSYYKCTHQGCSVRKHVERASHDLKSVITTYEGKHNHEVPAARNSGHGSSGSGNAPSAPQSNGSQRRQEQGQASFSQFGGAAPFSSFVLPPRNQFGPSASNFPFGMVPPGMAIPMPSLGSLAPAKMAGHPSTMQGYQGLMIPEGEMKTEPMSQLGFPAVNQSSSSFQQMMNRPPSFGPQM

SEQ ID NO: 1819 - protein, 1072 aa, Schizosaccharomyces pombe
MTYVTYLHKPSSIRNAVFCKFVNASSWNVIVAKVNCLEVYSYENNRLCLITSANIFAKIVNVKAFKPVSSPTDHIIVATDSFRYFTLFWDANDNTVSNGIKIQDCSERSLRESQSGPLLLVDPFQRVICLHVYQGLLTIIPIFKSKKRFMTSHNNPSLHDNFSVRIQELNVVDIAMLYNSSRPSLAVLYKDSKSIVHLSTYKINVREQEIDEDDVVCHDIEEGKLIPSENGGVFVFGEMYVYYISKDIQVSKLLLTYPITAFSPSISNDPETGLDSSIYIVADESGMLYKFKALFTDETVSMELEKLGESSIASCLIALPDNHLFVGSHFNNSVLLQLPSITKNNHKLEILQNFVNIAPISDFIIDDDQTGSSIITCSGAYKDGTLRIIRNSINIENVALIEMEGIKDFFSVSFRANYDNYIFLSLICETRAIIVSPEGVFSANHDLSCEESTIFVSTIYGNSQILQITTKEIRLFDGKKLHSWISPMSITCGSSFADNVCVAVAGGLILFFEGITEVGRYQCDTEVSSLCFTEENVVYVGLWSADIIMLTYCQDGISLTHSLKLTDIPRSIVYSQKYGDDGGTLYVSTNNGYVLMFNFQNGQVIEHSLRRNQLGVAPIILKHFDSKEKNAIFALGEKPQLMYYESDKLVITPLSCTEMLNISSYVNPSLGVNMLYCTNSYISLAKMSEIRSLNVQTVSVKGFPRRICSNSLFYFVLCMQLEESIGTQEQRLLSFLRVYEKNTLSEIAHHKFNEYEMVESIILMNDDKRVVVGTGFNFPDQDAPDSGRLMVFEMTSDNNIEMQAEHKVQGSVNTLVLYKHLIVAGINASVCIFEYEHGTMHVRNSIRTPTYTIDISVNQDEIIAADLMKSITVLQFIDDQLIEVARDYHPLWATSVEILSERKYFVTEADGNAVILLRDNVSPQLSDRKKLRWYKKFYLGELINKTRHCTFIEPQDKSLVTPQLLCATVDGSLMIVGDAGMSNTPLLLQLQDNIRKVIPSFGGLSHKEWKEYRGENETSPSDLIDGSLIESILGLREPILNEIVNGGHEGTKLDISVQDLKSIIENLEKLHP

SEQ ID NO: 1820 - protein, 124 aa, Mycoplasma hominis
MAKLTKEEFVSALKEMNIKEVMELIQGLKEEFGIDPTAVVAAAAPAAAADAAEEKTVFNVTLKSDGGNKLAVIKVVKDLLGLGLMDAKKLVESAPVVIKENAKKEEAEELKAKLTEAKAEVTLD

SEQ ID NO: 1821 - protein, 527 aa, Arabidopsis thaliana
MHSSHLLLEEPIRMTSILEPSKSSFFPALTKIVGTLGPKSRSVEVIAGCLKAGMSVARFDFSWCDADYHQETLENLKIAVKSTKKLCAVMLDTVGPELQVINKTEKAISLKADGLVTLTPSQDQEASSEVLPINFDGLAKAVKKGDTIFVGQYLFTGSETTSVWLEVEEVKGDDVICISRNAATLGGPLFTLHVSQVHIDMPTLTEKDKEVISTWGVQNKIDFLSLSYCRHAEDVRQARELLNSCGDLSQTQIFAKIENEEGLTHFDEILQEADGIILSRGNLGIDLPPEKVFLFQKAALYKCNMAGKPAVLTRVVDSMTDNLRPTRAGATDVANAVLDGSDAILLGAETLRGLYPVETISTVGRICCEAEKVFNQDLFFKKTVKYVGEPMTHLESIASSAVRAAIKVKASVIICFTSSGRAARLIAKYRPTMPVLSVVIPRLTTNQLKWSFSGAFEARQSLIVRGLFPMLADPRHPAESTSATNESVLKVALDHGKQAGVIKSHDRVVVCQKVGDASVVKIIELED

SEQ ID NO: 1822 - protein, 468 aa, Bifidobacterium longum
MRRSRQRRIMGRVVSYNEDVPRCTFCGKTEHQVRKLVAGPNASICDECIALCVDIISEERVKDAEVNSLSLPKPAQIFDYLNRYVIGQENAKRALSVAVYNHYKRVNMELQESAEQLDGNNGHGGQTGKQAKQSAPAQTRATRRNSDPLADVEVAKSNILLLGPTGVGKTYLAQALARVMNVPFVITDATTLTEAGYVGDDVETVLQRLLQAADGDVSRAQHGIIYIDEIDKIARKSGENTSITRDVSGEGVQQALLKILEGTIASVPLEGTRKHKEQDTAQMDTRGILFICGGAFVGLTDIVRKRLGRRETGFGANWHDADMKDEELLEQVNADDLAEFGLLPEFIGRLPVTSVLKELTVDDLTAILTQPANALIKQYRKLFAVDGVDLQFTEQAIRAIADIAIKQGTGARGLRSIIERTLQDTMFQLPSLDDVKQVIVDKASVEGSSTPKLLREAVDVPQGRLKVA

SEQ ID NO: 1823 - protein, 202 aa, Bifidobacterium longum
MPLEGTRKHKEQDTAQMDTRGILFICGGAFVGLTDIVRKRLGRRETGFGANWHDADMKDEELLEQVNADDLAEFGLLPEFIGRLPVTSVLKELTVDDLTAILTQPANALIKQYRKLFAVDGVDLQFTEQAIRAIADIAIKQGTGARGLRSIIERTLQDTMFQLPSLDDVKQVIVDKASVEGSSTPKLLREAVDVPQGRLKVA

SEQ ID NO: 1824 - protein, 424 aa, Brucella suis
MSKVSNGGGDSKNTLYCSFCGKSQHEVRKLIAGPTVFICDECVELCMDIIREENKSSMVKSREGVPTPQEIMAVLDDYVIGQKDAKRVLSVAVHNHYKRLAHQSKNSDIELAKSNILLVGPTGCGKTYLAQTLARIIDVPFIMADATTLTEAGYVGEDVENIILKLLQAADYNVERAQRGIVYIDEVDKISRKSDNPSITRDVSGEGVQQALLKIMEGTVASVPPQGGRKHPQQEFLQVDTTNILFICGGAFAGLDRIISARGEKTSIGFGATVKSVDERRIGEVFKELEPEDLLKFGLIPEFVGRLPVIATLEDLDVDALVQILTEPKNALVKQYQRLFDMENVELVFHDDALRAIANKAVEHKTGARGLRSIMEKILLDTMFELPTLEGVREVVISGDVVDGSARPLYIYAERQDEKGNVSA

SEQ ID NO: 1825 - protein, 124 aa, Brucella suis
MADLAKIVEDLSALTVLEAAELSKLLEEKWGVSAAAPVAVAAAGGAAPAAAAEEKTEFDVVLADGGANKINVIKEVRALTGLGLKEAKDLVEGAPKAVKEGASKDEAEKIKAQLEAAGAKVELK

SEQ ID NO: 1826 - protein, 637 aa, Brucella suis
MAKVIGIDLGTTNSCVAVMDGKNAKVIENAEGARTTPSIIAFTDGDERLAGQPAKRQAVTNPEGTLFAVKRLIGRRYDDPMVTKDKDLVPYKIVKGDNGDAWVEVHGKKYSPSQISAMILQKMKETAESYLGETVTQAVITVPAYFNDAQRQATKDAGKIAGLEVLRIINEPTAAALAYGLDKSEGKTIAVYDLGGGTFDVSVLEIGDGVFEVKSTNGDTFLGGEDFDIRLVEYLVAEFKKESGIDLKNDKLALQRLKEAAEKAKIELSSSQQTEINLPFITADQTGPKHLAIKLSRAKFESLVDDLVQRTVEPCKAALKDAGLKAGEIDEVVLVGGMTRMPKIQEVVKAFFGKEPHKGVNPDEVVAMGAAIQGGVLQGDVKDVLLLDVTPLSLGIETLGGVFTRLIERNTTIPTKKSQTFSTAEDNQSAVTIRVFQGEREMAADNKLLGQFDLVGIPPAPRGVPQIEVTFDIDANGIVNVSAKDKGTGKEHQIRIQASGGLTDADIEKMVKDAEANAEADKKRRESVEAKNQAESLVHSTEKSLAEYGDKVSADDKKAIEDAIAALKTSLEGEDAEDIKAKTQALAEVSMKLGQAMYEAAQAAEGAGAEGGEQASSSKDDVVDADYEEIDDNKKSS

SEQ ID NO: 1827 - protein, 890 aa, Arabidopsis thaliana
MTFWCMSILLIVGFLSKSELCEAQLSDEATLVAINRELGVPGWSSNGTDYCTWVGLKCGVNNSFVEMLDLSGLQLRGNVTLISDLRSLKHLDLSGNNFNGRIPTSFGNLSELEFLDLSLNRFVGAIPVEFGKLRGLRAFNISNNLLVGEIPDELKVLERLEEFQVSGNGLNGSIPHWVGNLSSLRVFTAYENDLVGEIPNGLGLVSELELLNLHSNQLEGKIPKGIFEKGKLKVLVLTQNRLTGELPEAVGICSGLSSIRIGNNELVGVIPRTIGNISGLTYFEADKNNLSGEIVAEFSKCSNLTLLNLAANGFAGTIPTELGQLINLQELILSGNSLFGEIPKSFLGSGNLNKLDLSNNRLNGTIPKELCSMPRLQYLLLDQNSIRGDIPHEIGNCVKLLQLQLGRNYLTGTIPPEIGRMRNLQIALNLSFNHLHGSLPPELGKLDKLVSLDVSNNLLTGSIPPLLKGMMSLIEVNFSNNLLNGPVPVFVPFQKSPNSSFLGNKELCGAPLSSSCGYSEDLDHLRYNHRVSYRIVLAVIGSGVAVFVSVTVVVLLFMMREKQEKAAAKNVDVEENVEDEQPAIIAGNVFLENLKQGIDLDAVVKATMKESNKLSTGTFSSVYKAVMPSGMIVSVKKLKSMDRAISHHQNKMIRELERLSKLCHDHLVRPIGFVIYEDVALLLHQHLPNGNLTQLIHESTKKPEYQPDWPMRLSIAVGAAEGLAFLHQVAIIHLDVSSSNVLLDSGYKAVLGEIEISKLLDPSRGTASISSVAGSFGYIPPEYAYTMQVTAPGNVYSYGVVLLEILTSRAPVEEEFGEGVDLVKWVHGASARGETPEQILDAKLSTVSFAWRREMLAALKVALLCTDITPAKRPKMKKVVEMLQEVKQIK

SEQ ID NO: 1828 - protein, 527 aa, Arabidopsis thaliana
MHSSHLLLEEPIRMASILEPSKSSFFPALTKIVGTLGPKSRSVEALSGCLKAGMSVARFDFSWGDADYHQETLDNLKVAVRSTKKLCAVMLDTVGPELQVINKSEKAITLKADGLVTLTPNQDQEASSEVLPINFNGLAKAVKKGDTIFVGQYLFTGSETTSVWLEVDEVKGDDVICLSRNAATLAGSLFTLHSSQVHIDLPTLTEKDKEVISTWGVQNKIDFLSLSYCRHAEDVRQTREMLKKLGDLSQTQIFAKIENVEGLTHFDEILQEADGIILSRGNLGIDLPPEKVFLFQKAALYKCNMAGKPAVLTRVVDSMTDNLRPTRAEATDVANAVLDGSDAILLGAETLRGLYPVETISTVGRICAEAEKVFNQDLYFKKTVKYVGEPMTHLESIASSAVRAAIKVKASVIICFTSSGRAARLIAKYRPTMPVISVVIPRVKTNQLKWSFSGAFEARQSLIVRGLFPMLADPRHPAESTSATNESVLKVALDHGKHAGVIKSHDRVVVCQKVGDASVVKIIELED

SEQ ID NO: 1829 - protein, 417 aa, Arabidopsis thaliana
MAATAATTTSSHLLLSSSRHVASSSQPSILSPRSLFSNNGKRAPTGVRNHQYASGVRCMAVAADAAETKTAARKKSGYELQTLTGWLLRQEMKGEIDAELTIVMSSISLACKQIASLVQRAGISNLTGVQGAVNIQGEDQKKLDVISNEVFSNCLRSSGRTGIIASEEEDVPVAVEESYSGNYVVVFDPLDGSSNIDAAVSTGSIFGIYSPNDECIVDDSDDISALGSEEQRCIVNVCQPGNNLLAAGYCMYSSSVIFVLTLGKGVFSFTLDPMYGEFVLTQENIEIPKAGRIYSFNEGNYQMWDDKLKKYIDDLKDPGPTGKPYSARYIGSLVGDFHRTLLYGGIYGYPRDAKSKNGKLRLLYECAPMSFIVEQAGGKGSDGHSRVLDIQPTEIHQRVPLYIGSTEEVEKLEKYLA

SEQ ID NO: 1830 - protein, 638 aa, Rhizobium leguminosarum
MAKVIGIDLGTTNSCVAVMDGKDAKVIENAEGARTTPSMVAFSDDGERLVGQPAKRQAVTNPTNTLFAVKRLIGRRYEDPTVEKDKHLVPFTIVKGDNGDAWVEANGKGYSPAQISAMILQKMKETAESYLGEKVEKAVITVPAYFNDARPGQPRMPAASLGLEVLRIINEPTAAALAYGLDKKEGKTIAVYDLGGGTFDISILEIGDGVFEVKSTNGDTFLGGEDFDMRLVEYLVAEFKRDNGIDLKNDKLALQRLKEAAEKAKIELSSSQQTEINLPFITADASGPKHLTLKLTRAKLESLVDDLVQRTIAPCKAALKDAGVTAAEIDEVVLVGGMSRMPKVQEVVKQLFGKEPHKGVNPDEVVALGAAIQAGVLQGDVKDVLLLDVTPLSLGIETLGGVFTRLIERNTTIPTKKSQTFSTAEDNQQAVTIRVSQGEREMAADNKLLGQFDLVCLPPSPRGMPQIEVTFDIDANGIVQVSAKDKGTGKEQQIRIQASGGLSDADIEKMVKDAEAHATEDKKRREAVEARNQAESLIHSSEKSLKDYGDKVSEADRTAISDAIAALKTASEASEPDADDIKAKTQTLMEVSMKLGQAIYEAQQAESGAAGMPPPKAGDNVVDADYEEIKDDDRKKSA

SEQ ID NO: 1831 - protein, 340 aa, Brucella suis
MTLVGNFSPLVLVGDSDRVEAETVGAYLDGWAGHDKVRLATANAIKAILSGAGRLVGRIARGYLPGDPGKLVGVNSDQDQQKSIDVGSHNLFVELLIAAGVASILSEEADLPVAGKADGLVAVAIDPLDGSGNVGLGAPLGTIFSIFPADVEEPFLQPGNRQIAAGYVSYGNSVDLGFSVGEGVIFATLDPVSGQFHITRRNVKLPERTSDLAFNASVQRHLSAGMQAYVNDAFLGKDGPRGRNFNMRWLGAAVGDMHRIMQRGGLFFYVNDSRPGYEKGRLRLVYEANPIAFLAREAGGKATDGSRPILDIVPQTYHERSALVFGVAEELDILGEYFVK

SEQ ID NO: 1832 - protein, 497 aa, Bifidobacterium longum
MYFKDGNDNAQRGGSTVRRSRQRRIMGRVVSYNEDVPRCTFCGKTEHQVRKLVAGPNASICDECIALCVDIISEERVKDAEVNSLSLPKPAQIFDYLNRYVIGQENAKRALSVAVYNHYKRVNMELQESAEQLDGNNGHSGQTSKQAKQSVPTQTRATRRSNDPLADVEVAKSNILLLGPTGVGKTYLAQALARVMNVPFVITDATTLTEAGYVGDDVETVLQRLLQAADGDVSRAQHGIIYIDEIDKIARKSGENTSITRDVSGEGVQQALLKILEGTIASVPLEGTRKHKEQDVAQMDTRGILFICGGAFVGLTDIVRKRLGRRETGFGANWHDADMKDEELLEQVNADDLAEFGLLPEFIGRLPVTSVLKELTVDDLTAILTQPANALIKQYRKLFAVDGVDLQFTEQAIRAIADIAIKQGTGARGLRSIIERTLQDTMFQLPSLDDVRQVIVDKASVEGSSTPKLLREAVDVPQGRLKVAQSVLLDRVRTHEA

SEQ ID NO: 1833 - protein, 635 aa, Haemophilus somnus
MGKIIGIDLGTTNSCVAVMDGDKPRVIENAEGERTTPSIIAYTNDNETLVGQPAKRQAVTNPKNTLFAIKRLIGRRFEDQEVQRDVAIMPFEITKADNGDAWVSVKGEKMAPPQISAEVLKKMKKTAEDFLGETVTEAVITVPAYFNDAQRQATKDAGRIAGLEVKRIINEPTAAALAYGLDKGKGNQTIAVYDLGGGTFDLSIIEIDEVGGEKTFEVLATNGDTHLGGEDFDNRVINYLVDEFKKEQGVDLRNDPLAMQRLKEAGEKAKIELSSAQQTDVNLPYITADATGPKHLNIKLTRAKLEALVEDLVARSMEPVKVALSDAGLSVSEINDVILVGGQTRMPLVQQKVAEFFGKEPRRDVNPDEAVAIGAAVQGGVLAGDVKDVLLLDVTPLSLGIETMGGVMTTLIEKNTTIPTKKSQVFSTAEDNQSAVTIHVLQGERKQASANKSLGQFNLEGINPAPRGMPQIEVTFDIDADGIIHVSAKDKGTGKEQKITIKASSGLSDEEIQQMVRDAEANAEADRKFEELVQARNQADHLVHSTRKQLAEVGEKLSAEDKAPIESAVNELETAAKGEDKTEIDAKVQALIQVSEKLLQASQQQAQADAGAQQSQSTKGGDDVVDAEFEEVKDK

SEQ ID NO: 1834 - protein, 414 aa, Haemophilus somnus
MTKEKELHCSFCGKEQKEVDKLIAGTSGYICNECIELCHDMLANADDIEEIDEEFQEEEPKLPTPHEIRAHLDDYVIGQDYAKKVLAVAVYNHYKRLRSEKNTSEVELGKSNILLIGPTGSGKTLLAQTLARMLNVPFAMADATTLTEAGYVGEDVENVLQKLLQNCDYDIEKAQQGIIYIDEIDKITRKSENPSITRDVSGEGVQQALLKLVEGTVASIPPQGGRKHPQQEMLRVDTSKILFICGGAFAGLDKIIEKRTNTGGKGIGFGADVRIDEEKVSLTELFKQVEPDDLMKFGLIPEFIGRLPVIAPLSELDEEALVKILTEPKNALTKQYQVLFSLENIELEFTQEALIAMAKKALARKTGARGLRSIVETLLLDTMYDLPSIENLQKVIVEEETVTENKAPVLKFNS

SEQ ID NO: 1835 - protein, 122 aa, Haemophilus somnus
MSLTNEQIIEAIASKTVTEIVELISAMEEKFGVSAAAAAVAVAAGPAEVAEEKTEFDVVLAEAGANKVAVIKAVRGATGLGLKEAKDLVESAPANLKEGISKAEAEALKKELEEAGAKVEIK

SEQ ID NO: 1836 - protein, 427 aa, Pseudomonas syringae
MTDTRNGEDNGKLLYCSFCGKSQHEVRKLIAGPSVFICDECVDLCNDIIREEVQEAQAESSAHKLPSPKEISGILDQYVIGQERAKKVLAVAVYNHYKRLNQRDKKNDDVELGKSNILLIGPTGSGKTLLAETLARLLNVPFTIADATTLTEAGYVGEDVENIIQKLLQKCDYDVEKAQMGIVYIDEIDKISRKSDNPSITRDVSGEGVQQALLKLIEGTVASVPPQGGRKHPQQEFLQVDTRNILFICGGAFSGLEKVIQNRSTRGGIGFNAEVRSKEEGKKVGESLREVEPDDLVKFGLIPEFVGRLPVLATLDELDEAALIQILTEPKNALTKQYAKLFEMEGVDLEFRTDALKSVARRALERKTGARGLRSILEGVLLDTMYEIPSQSDVSKVVIDESVIDGTSKPLLIYENSEPPAKVAPDA

SEQ ID NO: 1837 - protein, 336 aa, Pseudomonas syringae
MSRVTLSRYLIEQTRSNNTPADLRFLIEVVARACKEISHAVSKGALGGVLGSMGTENVQGEVQKKLDVISNEILLEANEWGGHLAGMASEEMDNAYQIPGKYPKGAYLLVFDPLDGSSNIDINAPVGTIFSVLRCPNEYLSQNEALNEKAFLQPGTEQVAAGYAIYGPQTMLVLTLGDGVKGFTLDREMGSFVLTHEDITIPESTQEFAVNMSNQRHWEAPVQRYVSELLAGEDGPLKKNYNMRWVAAMVADVHRILTRGGLFMYPRDSREPSKPGKLRLMYEANPMSFLVEQAGGASTDGHQRILDIQPEGLHQRVAVYLGSKEEVERATAYHKA

SEQ ID NO: 1838 - protein, 305 aa, Saccharomyces cerevisiae
MSSSSQFKQLEKLGNGTYATVYKGLNKTTGVYVALKEVKLDSEEGTPSTAIREISLMKELKHENIVRLYDVIHTENKLTLVFEFMDNDLKKYMDSRTVGNTPRGLELNLVKYFQWQLLQGLAFCHENKILHRDLKPQNLLINKRGQLKLGDFGLARAFGIPVNTFSSEVVTLWYRAPDVLMGSRTYSTSIDIWSCGCILAEMITGKPLFPGTNDEEQLKLIFDIMGTPNESLWPSVTKLPKYNPNIQQRPPRDLRQVLQPHTKEPLDGNLMDFLHGLLQLNPDMRLSAKQALHHPWFAEYYHHAS

SEQ ID NO: 1839 - protein, 496 aa, Pseudomonas syringae
MVAELLARLGVANSAHTQGDYPVYTPIDGSRIASVTLEGKAQVVARIDSAHSAFLKWRTVPAPRRGELVRIFGEVLREHKADLGELVSVEAGKITQEGLGEVQEMIDICDFAVGLSRQLYGLTIASERPGHHMRETWHPLGVVGVISAFNFPVAVWAWNTTLALVCGNPVIWKPSEKTPLTALACQALFDKALKIFGDAPAALAQLVIGDRDAGEALVDDPRVPLISATGSTRMGREVGPRVAARFGRSILELGGNNAMILAPSADLDLAVRGILFSAVGTAGQRCTTLRRLIVHRSIKDEVVARVKAAYAKVRVGDPREGNLIGPLIDQQAFSAMQNALTKARDEGGQVFGGERQLQDKYPNGYYVTPAIAEMPGQSEVVRHETFAPILYVLAYDDFEEALRLNNEVPQGLSSCIFTTDLREAEAFQSAAGSDCGIANVNIGTSGAEIGGAFGGEKETGGGRESGSDSWRAYMRRQTNTVNYSRELPLAQGIVFD

SEQ ID NO: 1840 - protein, 414 aa, Pseudomonas syringae
MSRRRVVVTGMGMLSPLGNDVPSSWQGILAGRSGIGLIEHTDLSAFTTRFGGSVKGFNVEEYLAPKEARRLDLFIQYGLAASFQAVRNAGLEVTDANRERIGVAMGSGIGGLTNIENSSRLLHEQGPGRISPFFVPGSIINMISGFLSIHLGAQGPNYSIATACTTATHCIGMAARNIAYDEADVMIAGGAEMAACGLGLGGFGAARALSTRNDDPTRASRPWDKGRDGFVLSDGAGAMVLEELEHAKARGATIYAELVGFGMSGDAYHMTSPPDDGAGAARCIVNALRDAKVNPDQVQYINAHGTSTPAGDLAEASAIKSVFGDHAYKLAVSSTKSMTGHLLGAAGAVEAIFSVLAMVDQVAPPTINLDEPSEGCDLDFVPHEARRMPIDVVLSNSFGFGGTNGSLVFRRFAE

SEQ ID NO: 1841 - protein, 417 aa, Desulfovibrio desulfuricans
MDRKNDGSAQEPRCSFCQKGPDSVKRLISGPDVYICDACVELCNEIIAQEHVQESVDAGKLLSPAEIKARLDEYVIGQHTAKKILSVAVHNHYKRVFFAETLSDEVELEKSNILLVGSSGSGKTLLAKTLARVLNVPFAIADATTLTEAGYVGEDVENILVQLLQNADYDIEAASKGIVYIDEIDKISRKGDGPSITRDVSGEGVQQALLKIIEGTEANIPPKGGRKHPQQEFIRLDTSNILFIMGGAFIGLDKIIEQRMHGGAMGFGVKVASKKETPLSDLLGNVHPNDLVKFGLIPEFIGRIPVITHVNELAEDDLVRILQEPKNALVRQYQKLFELDHVKLRFTSNALRAVARQAIERKTGARGLRNVLESVMLEIMFNLPSMTGVKECVINTAVVEEGKEPIFLYQTEAKTGT

SEQ ID NO: 1842 - protein, 713 aa, Desulfovibrio desulfuricans
MLGQALFAKQKAAFPQHAVYTAYIPPKTRQHPAFVQKKSIPPLARLKNSLNFPSKRKIHRRRAGRFNIDLLRRISIMGKIIGIDLGTTNSCVYIMEGKDPKCITNPEGGRTTPSVVGFTDKERLVGDIAKRQAVTNPERTVFAIKRLMGRKADAPEVARWKEHSPYQIVAGPNGDAYVEIEGRKYSPAEVSAMVLAKLKADAEAYLGETVTEAVITVPAYFNDSQRQSTKDAGRIAGLDVKRIINEPTAASLAYGFDKKANEKIAVFDLGGGTFDISILEVGDNVVEVRATNGDTFLGGEDFDQRVINYLVEEFRRENGIDLSRDRMALQRLKEAAEKAKKDLSTSMETEINLPFITADQTGPKHLMIKLSRAKLEKLVEDLVERTIEPCRKALSDAGLSASEVDEVVLVGGMTRMPLVQKKVADFFGKEPNRSMNPDEVVSMGAAIQGGILAGDVKDVLLLDVTPLSLGIETLGGVFTRLIERNTTIPTKKSQTFTTAADNQPSVSIHVMQGERPMASDNMTLGRFELTGIPAAPRGMPQIEVSFDIDANGIVNVSAKDLGTGKEQSIRITASSGLSEDEIQNLVKEAEAHADEDKKKKELIEARNQADSLIYTTEKSLSDLGDKLEADLKKEIEDKTAALKTAMEGSDVDAIKKATDELSQASHKLAEKLYAQQQAGAQGAAGAEAGAGDAGAKASQDEDVVDADYTEVKN

SEQ ID NO: 1843 - protein, 338 aa, Desulfovibrio desulfuricans
MRQVTVTEHLLLHQTKSPAATGQFTALLYDLILAAKIISKSVNKAGLLDVLGGTGQVNVQGEHVQKLDEYANRVLIHRMERTGVLCAMASEENADLIRVPERFEAGDYILIFDPLDGSSNIDVNINVGTIFSILKRKPGASGSKDVTLGDVLQSGVEQVAAGYFLYGPSTMLVYSSGQGVHGFTLDPSVGEFLLSHPDIRYPEQGRIYSVNESYWHYWDEPTREVVSYFKGPDNPLGKPYSLRYVGSLVADFHRNLFYGGIFMYPMDYRLPEKPQGKLRLMCEASPLAFLAEQAGGRATDGTKRILDIVPGELHQRVPLFIGSAGDVDAVEAIYRRHS

SEQ ID NO: 1844 - protein, 263 aa, Gossypioides kirkii
AWTKEEDQRLIDYIRVHGEGCWRSLPKAAGLLRCGKSCRLRWINYLRPDLKRGNFTEEEDELIIKLHSLLGNKWSLIAGRLPGRTDNEIKNYWNTHIKRKLISRGIDPQTHRPLNQTANTNTVTAPTELDFRNTPTSVSKSSSIKNPNFNYNEFQFKSNTDSLEEPNCTASSGMTTDEEQQEQLHKKQQHDPCNGQDLNLELSIGIVSADSSRVSSANSAESKPKLDNNNFQFLEQAMVAKAVCLCWQLGFRTSEICRNCQNS

SEQ ID NO: 1845 - protein, 941 aa, Oryza sativa
MNAFRNKINELELKELYLFGRRYTWSSEQQIPTLVKLDRVLVSTEWEDAFPDAHLQALSSSSSDHCALLLSCGETPQGRRRFRFETFWTKLEDFDQVVADSWQQAVESTDPYVILYVKMARLAMSLCSWGQKRISRFRLQLQIANELIFRFDVAQENRLLSPLERRFRAILKGRCLALASLERIRVRQRARISQLREGDANSKYFHMKVNARRRKLFIPVLEYEGQTTTSQEDKIALAKDYFQGILGVSEPNSAELQFNQIFPLAPNLQELEVPFSEEEVWKVIKEMPNEKAPGPDGFTGLFYQRCWQVIKGEVLAALTKFHSGNHQNLDNLNTAVITLLPKKDAPTLIKDYRPISLIHSFSKLATKILASRLAPRMGDLVAENQTAFIRGRSIHENFIFVRGLALQFHRRKKPMILLKLDITKAFDTISWCFLLNLLRNRGFGSRWRSWIAALLLTSETRILLNGHESDSFKPARGLRQGDPLSPLLFVLVMDALQGLLAKATSWGLLAKLDTRRSIPNTSIYADDTIVFLQPIEREATVVNAILQLFGKATGLKTNLSKSALTPIRCDDDVLVGVQQLLGCRVENFPITYLGLPLSLRRPTKAEVQPILDRLSKKVAGWKPKLLSPDGRLRLIKSVLTALPVHFMSVLVLPKWAIKEFNKKCRAFLWKGQEEVNGGHCLVAWDIVCSPKECGGLGVKNLELFGQAMRMKWLARRLEQRGRPWTLINSVPTNDITGLFQSVASFQVGDGKDTDFWRANWLPRGCISVSSPLLFTHLGRTKLTVAEALSQNRWVRDIRGSFSALALSEYFRLWDEIQEVQLQEDAQDSTSWKLTPNRVFCTASVYEMFFAARVRSQCAELIWQARGPSRLKFFMWLITKGRCLTADNLQKRGWPHEDGCVLCNGDQESCDHLLLGCPFTNRIWGLLRTWLGTPFPLPGDDD

SEQ ID NO: 1846 - protein, 420 aa, Brucella suis
MRRVVITGLGLVSPLASGVEETWKRLLAGESGARRVTEFEVDDLACQIACRIPVGDGTNGTFNPDLHMDPKEQRKVDPFIVYAVGAADQALDDAGWHPENDEDQVRTGVLIGSGIGGIEGIVEAGYTLRDKGPRRISPFFIPGRLINLASGHVSIKHKLRGPNHSVVTACATGTHAIGDAARLIAFGDADVMVAGGTESPVSRISLAGFAACKALSTKRNDDPTAASRPYDEDRDGFVMGEGAGIVVLEELEHALARGAKIYAEVIGYGMSGDAFHITAPTESGEGAQRCMVAALKRAGIVPDEIDYINAHGTSTMADTIELGAVERVVGEAAAKISMSSTKSSIGHLLGAAGAAEAIFSTLAIRDNIAPATLNLDNPAAQTRIDLVPHKPRERKIDVALSNSFGFGGTNASLVLRRYTA

SEQ ID NO: 1847 - protein, 478 aa, Brucella suis
MKRNRKVKILATLGPASGEEAVIRKLFEAGADVFRINMSHADHDLMRTLVKRIRNVEKELGRPIGILADLQGPKLRVGKFKDGKVDLVPGQTFTLDNNEALGDETRVFLPHPEILEAVEPGHRLLIDDGKLHLVAEACDGKSIRCKVVSGTRISDRKGVSLPDTTLGVGALTEKDRCDLDAVLKEEIDWVALSFIQRPEDLAEVRKVSRGKVGLMSKIEKPQAVTRLDEIIELSDALMVARGDLGVEVPLENVPGIQKQITRKARRAGKPVVVATQMLESMITAPVPTRAEVSDVATAVFEGADAIMLSAESASGQYPVEAVATMNRIAEQVEREPTYSTIIDAQRAMPEPTGADAISLAARQIAETLKLSAIVTYTASGTTGLRAARERPRTPIIALSPVVDTARKLSLVWGLHCVVTDDAHDLEDMVNHACEIVFHEEFGKAGDRVIITAGVPFGTPGATNMLRIAYIGADGKSGI

SEQ ID NO: 1848 - protein, 922 aa, Pisum sativum
MEYGGGIVDDGGVFGTMVGGDQGDIIEELLGEGCWIEASENNMMAMQQTASPPQQHYIGNNIPIGMGEGDHFNHHQVDQESGFVVGKRWWIGPRGSQGPSTSVKERLVVAVGYLKEYTKNSSNNVLIQIWVPALRRRSAIHYLQQDSSSSVPVSVNPNMNVHVRFFRSHEYPRHQQQQQQYGSLLALPVFERGSGTCLGVIEFVIANQNLINYRPQLDHLSNALEAVDFRSSHNMNIQPAVKVIFEELYEAAVNEIVEVLASVCKTHNLPLALTWAPCIQQQGGGKGTTGGGGCSVSVTVPTDQMNNNNHMMMSCISTVDSACYVGDMEVLGFQEACSEYHLFNGQGIVGTAFTTTKPCFAIDITAFSKAEYPLAHHADMFGLHAAVAIPLRSVYTGSAADFVLEFFLPKDCRDTEQQKQMLNSLSLVVQQACRSLHLHVVMEDDNANHHEDQDQFTFPTTTNNYMPSSASDAATTASLSQVDAASGCSTKDTTSSSCSWIAHMMEAQNKGKGVSVSLEYLQEPKEEFKVTTCNWEREGNSVFSEFGQVIQHDQSSNSRASVEAGEESGGGGTGGGRRSSSSSSGRKSGDKRRTKAEKTISLPVLRQYFAGSLKDAAKSIGGCPTTLKRICRQHGITRWPSRKIKKVGHSLKKLQLVIDSVQGAEGAIQIGSFYASFPELSTAAAHGGGGGGDHINNNSFYNSHGDLVTNLKSPPSACSQTHAAGNKSIINGDHHHHHHQHLVMTENLAAPSAVDALMQHASTINIQDYQQLQEDHDTKQLLLHFNNNNNNSNNQTLPPRPTVTWNNNNSSSSGLLERGAFRVKATFADEKIRFSLQAVWCFRDLQLEIARRFNLNDMNNLVLKYLDDEGEWVVLACDSDLEECKDLHTSSHTRTIRLSLFQASPLNNLANSFRNNSSSPSS

SEQ ID NO: 1849 - protein, 924 aa, Pisum sativum
MEYGGGIVDDGGVFGTMVGGDQGDIIEELLGEGCWIEASENNMMAMQQTASPPQQHYIGNNIPIGMGEGDHFNHHQVDQESGFVVGKRWWIGPRGSQGPSTSVKERLVVAVGYLKEYTKNSSNNVLIQIWVPALRRRSAIHYLQQDSSSSVPVSVNPNMNVHVRFFRSHEYPRHQQQQQQYGSLLALPVFERGSGTCLGVIEFVIANQNLINYRPQLDHLSNALEAVDFRSSHNMNIQPAVKVVFEELYEAAVNEIVEVLASVCKTHNLPLALTWAPCIQQQGGGKGTTGGGGCSVSVTVPTDQMNNNNHMMMSCISTVDSACYVGDMEVLGFQEACSEYHLFNGQGIVGTAFTTTKPCFAIDITAFSKAEYPLAHHADMFGLHAAVAIPLRSVYTGSAADFVLEFFLPKDCRDTEQQKQMLNSLSLVVQQACRSLHLHVVMEDDNANHHEDQDQFTFPTTTNNYMPSSASDAATTASLSQVDAASGCSTKDTTSSSCSWIAHMMEAQNKGKGVSVSLEYLQEPKEEFKVTTCNWEREGNSVFSEFGQVIQHDQSSNSRASVEAGEESGGGGTGGGRRSSSSSSGRKSGDKRRTKAEKTISLPVLRQYFAGSLKDAAKSIGGPTTLKRICRQHGITRWPSRKIKKVGHSLKKLQLVIDSVQGAEGAIQIGSFYASFPELSTAAAHGGGGGGGDHINNNSFYNSHGDLVTNLKSPPSACSQTHAAGNKSIINGDHHHHHHHQHLVMTENLAAPSAVDALMQHASTINIQDYQQLQEDHDTKQLLLHFNNNNNNNSNNQTLPPRPTVTWNNNNSSSSGLLERGAFRVKATFADEKIRFSLQAVWCFRDLQLEIARRFNLNDMNNLVLKYLDDEGEWVVLACDSDLEECKDLHTSSHTRTIRLSLFQASPLNNLANSFRNNSSSPSS

SEQ ID NO: 1850 - protein, 921 aa, Pisum sativum
MEYGGGIVDDGGVFGTMVGGDQGDIIEELLGEGCWIEASENNMMAMQQTASPPQQHYIGNNIPIGMGEGDHFNHHQVDQESGFVVGKRWWIGPRGSQGPSTSVKERLVVAVGYLKEYTKNSSNNVLIQIWVPALRRRSAIHYLQQDSSSSVPVSVNPNMNVHVRFFRSHEYPRHQQQQQQYGSLLALPVFERGSGTCLGVIEFVIANQNLINYRPQLDHLSNALEAVDFRSSHNMNIQPAVKVFEELYEAAVNEIVEVLASVCKTHNLPLALTWAPCIQQQGGGKGTTGGGGCSVSVTVPTDQMNNNNHMMMSCISTVDSACYVGDMEVLGFQEACSEYHLFNGQGIVGTAFTTTKPCFAIDITAFSKAEYPLAHHADMFGLHAAVAIPLRSVYTGSAADFVLEFFLPKDCRDTEQQKQMLNSLSLVVQQACRSLHLHVVMEDDNANHHEDQDQFTFPTTTNNYMPSSASDVATTASLSQVDAASGCSTKDTTSSSCSWIAHMMEAQNKGKGVSVSLEYLQEPKEEFKVTTCNWEREGNSVFSEFGQVIQHDQSSNSRASVEAGEESGGGGTGGGRRSSSSSSGRKSGDKRRTKAEKTISLPVLRQYFAGSLKDAAKSIGVCPTTLKRICRQHGITRWPSRKIKKVGHSLKKLQLVIDSVQGAEGAIQIGSFYASFPELSTAAAHGGGGGGDHINNNSFYNSHGDLVTNLKSPPSACSQTHAAGNKSIVNGDHHHHHHQHLVMTENLAAPSAVDALMQHASTINIQDYQQLQEDHDTKQLLLHFNNNNNNSNNQTLPPRPTVTWNNNNSSSSGLLERGAFRVKATFADEKIRFSLQAVWCFRDLQLEIARRFNLNDMNNLVLKYLDDEGEWVVLACDSDLEECKDLHTSSHTRTIRLSLFQASPLNNLANSFRNNSSSPSS

SEQ ID NO: 1851 - protein, 924 aa, Pisum sativum
MEYGGGIVDDGGVFGTMVGGDQGDIIEELLGEGCWIEASENNMMAMQQTASPPQQHYIGNNIPIGMGEGDHFNHHQVDQESGFVVGKRWWIGPRGSQGPSTSVKERLVVAVGYLKEYTKNSSNNVLIQIWVPALRRRSAIHYLQQDSSSSVPVSVNPNMNVHVRFFRSHEYPRHQQQQQQYGSLLALPVFERGSGTCLGVIEFVIANQNLINYRPQLDHLSNALEAVDFRSSHNMNIQPAVKVFEELYEAAVNEIVEVLASVCKTHNLPLALTWAPCIQQQGGGKGTTGGGGCSVSVTVPTDQMNNNNHMMMSCISTVDSACYVGDMEVLGFQEACSEYHLFNGQGIVGTAFTTTKPCFAIDITAFSKAEYPLAHHADMFGLHAAVAIPLRSVYTGSAADFVLEFFLPKDCRDTEQQKQMLNSLSLVVQQACRSLHLHVVMEDDNANHHEDQDQFTFPTTTNNYMPSSASDAATTASLSQVDAASGCSTKDTTSSSCSWIAHMMEAQNKGKGVSVSLEYLQEPKEEFKVTTCNWEREGNSVFSEFGQVIQHDQSSNSRASVEAGEESGGGGTGGGRRSSSSSSGRKSGDKRRTKAEKTISLPVLRQYFAGSLKDAAKSIGVCPTTLKRICRQHGITRWPSRKIKKVGHSLKKLQLVIDSVQGAEGAIQIGSFYASFPELSTAAAHGGGGGGGDHINNNSFYNSHGDLVTNLKSPPSACSQTHAAGNKSIINGDHHHHHHHQHLVMTENLAAPSAVDALMQHASTINIQDYQQLQEDHDTKQLLLHFNNNNNNNSNNQTLPPRPTVTWNNNNSSSSGLLERGAFRVKATFADEKIRFSLQAVWCFRDLQLEIARRFNLNDMNNLVLKYLDDEGEWVVLACDSDLEECKDLHTSSHTRTIRLSLFQASPLNNLANSFRNNSSSPSS

SEQ ID NO: 1852 - protein, 568 aa, Oryza sativa
MQDQRAGPAKSKEKKRVSRHKQAKLTTVIIKAVPLTTKELRQKKSELRVERRRVKMGGDERAVAAPLLQQQQDGGGGDGERRRRRWWWGWWDGEEAAGQLAFAAPMVATSMAYYAIPLVSVMYAGRLGELELAGATLGNSWGTVTGIALMPWLNIRGVLAAKGLQKDKLDTGLSGSLETLCGQGYGAKMYHMMGVYLQASIITSAFFSVLVSLLWFYSEPVLIFLRQDPEVTRTATLFLRYSIPAQFAYGFIQCTLRFLQTQSVVTPLVVFALLPLVLHFGITHAFVHYLGFGYAGAGMSTSVSLWLSFLMLAAYVCLSERFKHTWEGFSTEAFRHVLPGLKLAIPSAVMVCFEYWAFEVLVLVAGLMPNSHMSTSIIAMCENTEAISYMITYGFAAAISTRVSNELGAGNVAKAKKALAVTLVLSLLLGVAFLLLLGLGHDLWAGLFSKSDAVISEFASMTPLLIGSVVLDSTQGVLSGVSRGCGWQHLAAWTNLVAFYIVGLPLSILFGFKLGLQTKDQMGKIRADNERQRRRFCLLRLERSELTSLAAAYASLVESNIEVKSFRA

SEQ ID NO: 1853 - protein, 383 aa, Escherichia coli
MGKIIGIDLGTTNSCVAIMDGTTPRVLENAEGDRTTPSIIAYTQDGETLVGQPAKRQAVTNPQNTLFAIKRLIGRRFQDEEVQRDVSIMPFKIIAADNGDAWVEVKGQKMAPPQISAEVLKKMKKTAEDYLGEPVTEAVITVPAYFNDAQRQATKDAGRIAGLEVKRIINEPTAAALAYGLDKGTGNRTIAVYDLGGGTFDISIIEIDEVDGEKTFEVLATNGDTHLGGEDFDSRLINYLVEEFKKDQGIDLRNDPLAMQRLKEAAEKAKIELSSAQQTDVNLPYITADATGPKHMNIKVTRAKLESLVEDLVNRSIELLKVALQDAGLSVSDIDDVILVGGQTRMPMVQKKVAEFFGKEPRKDVNPDEAVAIGAAVQGGVLT

SEQ ID NO: 1854 - protein, 651 aa, Oryza sativa
MAGSERTVVWFRRDLRIDDNPALAAAARDGVVLPVFIWCPADEGQFYPGRCSRWWLKQSLPHLSQSLESLGCPLVLIRAESTLEALLRCIDSVGATRLVYNHLYDPVSLVRDDKIKKELSALGISIQSFNGDLLYEPWEIYDDSGLAFTTFNMYWEKCMELPIDISPSLAPWKLVPAPGLESVRSCSVDDLGLESSKDEESSNALLRRAWSPGWRNAEKMLEEFVSHGLLEYSKHGMKVEGATTSLLSPYLHFGEVSVRKVYQLVRMQQIKWENEGTSEAEESIHFFMRSIGLREYSRYLCFNFPFTHEKSLLGNLKHYPWKVDEERFKSWRQGMTGYPLVDAGMRELWATGWTHNRIRVIISSFAVKFLLIPWTWGMKYFWDVLLDADLESDILGWQYISGSLPDGHELSRLDNPEVQGQKYDPDGVYVRTWIPELARMPTEWIHHPWDAPSCILEVAGVELGFNYPKPIVDLHIARECLDDSISTMWQLDTAEKLAELDGEVVEDNLSNIKTFDIPKVVLRETSPCALPIDQRVPHASSKDHNLKSKVLKASNRSSICVDMIRSSKMEATSSVANSPVSRKRSFCETAFHVPSYSSSAEVHSHIQDHGGSLVGPSRYLLQEAGRNCVDEVEDSSTADSGSSISRQRKAA

SEQ ID NO: 1855 - protein, 841 aa, Arabidopsis thaliana
MELDDLDLSGSWPLDQITFASNFKSPVIFSSSEQPFSPLWSFSETSGDVGGELYSAAVAPTRFTDYSVLLASSESETTTKENNQVPSPSWGIMPLENPDSYCAIKAKMTQALRYFKESTGQQHVLAQVWAPVKNRGRYVLTTSGQPFVLGPNSNGLNQYRMVSLTYMFSLDGERDGELGLPGRVFRKKLPEWTPNVQYYSSKEFSRLGHALHYNVQGTLALPVFEPSRQLCVGVVELIMTSPKINYAPEVEKVCKALEAVNLKTSEILNHETTQICNEGRQNALAEILEILTVVCETYKLPLAQTWVPCRHRSVLAFGGGFKKSCSSFDGSCMGKVCMSTSDLAVYVVDAHVWGFRDACAEHHLQKGQGVAGRAFQSGNLCFCRDVTRFCKTDYPLVHYARMFKLTSCFAVCLKSTYTGDDEYVLEFFLPPAITDKSEQDCLLGSLLQTMKQHYSSLKVVSETELCENNMSLEVVEASEDGMVYSKLEPIRIHHPAQISKDYLELNAPEQKVSLNSDFMENNEVDDGVERFQTLDPIPEAKTVKKSERKRGKTEKTISLEVLQQYFAGSLKDAAKSLGVCPTTMKRICRQHGISRWPSRKINKVNRSLTRLKHVIDSVQGADGSLNLTSLSPRPWPHQIPPIDIQLAKNCPPTSTSPLSNLQDVKIENRDAEDSAGSSTSRASCKVNPICETRFRLPTHNQEPSRQVALDDSDSSSKNMTNFWAHLTCQDTASPTILQHKLVSIKATYREDIIRFKISPESVSITELKQQVAKRLKLETAAFELKYLDDDREWVSVSCDADLSECLDTSAAKANTLRLSVHDVTFNFGSSCESSEETMMCL

SEQ ID NO: 1856 - protein, 532 aa, Arabidopsis thaliana
MVGSEVLEECGEKISKKESKKRAAKLEKLLRKQEREEATSSSLSLEEEDESCSSNYGDVTTNELQSAVEGKELTDVSNLVEEIVGSEVSIRGRLHKNRLVGTKLFVILRESGFTVQCVVEETRVGANMIKFVKQLSRESVVELIGVVSHPKKPLTGTTQQVEIHVRKMYCLSRSLPNLPLVVEDAARSESDIEKSGKDGKQAARVLQDTRLNNRVLDIRTPANQAIFRIQCQVQIAFREYLQSKGFLEIHTPKLIAGSSEGGSAVFRLDYKGQPACLAQSPQLHKQMAICGDMRRVFEVGPVFRAEDSFTHRHLCEFVGLDVEMEIRMHYSEIMDLVGELFPFIFTKIEERCPKELESVRKQYPFQSLKFLPQTLRLTFAEGIQMLKEAGEEVDPLGDLNTESERKLGQLVLEKYKTEFYMLHRYPSAVRPFYTMPYENDSNYSNSFDVFIRGEEIMSGAQRIHDPELLEKRARECGIDVKTISTYIDAFRYGAPPHGGFGVGLERVVMLLCALNNIRKTSLFPRDSQRLTP

SEQ ID NO: 1857 - protein, 638 aa, Shigella flexneri
MGKIIGIDLGTTNSCVAIMDGTIPRVLENAEGDRTTPSIIAYTQDGETLVGQPAKRQAVTNPQNTLFAIKRLIGRRFQDEEVQRDVSIMPFKIIAADNGDAWVEVKGQKMAPPQISAEVLKKMKKTAEDYLGEPVTEAVITVPAYFNDAQRQATKDAGRIAGLEVKRIINEPTAAALAYGLDKGTGNRTIAVYDLGGGTFDISIIEIDEVDGEKTFEVLATNGDTHLGGEDFDSRLINYLVEEFKKDQGIDLRNDPLAMQRLKEAAEKAKIELSSAQQTDVNLPYITADATGPKHMNIKVTRAKLESLVEDLVNRSIEPLKVALQDAGLSVSDIDDVILVGGQTRMPMVQKKVAEFFGKEPRKDVNPDEAVAIGAAVQGGVLTGDVKDVLLLDVTPLSLGIETMGGVMTTLIAKNTTIPTKHSQVFSTAEDNQSAVTIHVLQGERKRAADNKSLGQFNLDGINPAPRGMPQIEVTFDIDADGILHVSAKDKNSGKEQKITIKASSGLNEDEIQKMVRDAEANAEADRKFEELVQTRNQGDHLLHSTRKQVEEAGDKLPADDKTAIESALTALETALKGEDKAAIEAKMQELAQVSQKLMEIAQQQHAQQQTAGADASANNAKDDDVVDAEFEEVKDKK

SEQ ID NO: 1858 - protein, 542 aa, Shigella flexneri
MVSALWTVELNDSKTDTHVGLRHKHTFLCTLFRCHLSLERGTTTFVIPDSLSGSAPRKQVSPILLNLKTKTVMKKTKIVCTIGPKTESEEMLAKMLDAGMNVMRLNFSHGDYAEHGQRIQNLRNVMSKTGKTAAILLDTKGPEIRTMKLEGGNDVSLKAGQTFTFTTDKSVIGNSEMVAVTYEGFTTDLSVGNTVLVDDGLIGMEVTAIEGNKVICKVLNNGDLGENKGVNLPGVSIALPALAEKDKQDLIFGCEKGVDFVAASFIRKRSDVIEIREHLKAHGGENIHIISKIENQEGLNNFDEILEASDGIMVARGDLGVEIPVEEVIFAQKMMIEKCIRARKVVITATQMLDSMIKNPRPTRAEAGDVANAILDGTDAVMLSGESAKGKYPLEAVSIMATICERTDRVMNSRLEFNNDNRKLRITEAVCRGAVETAEKLDAPLIVVATQGGKSARAVRKYFPDATILALTTNEKTAHQLVLSKGVVPQLVKEITSTDDFYRLGKELALQSGLAHKGDVVVMVSGALVPSGTTNTASVHVL

SEQ ID NO: 1859 - protein, 353 aa, Shigella flexneri
MRLFVKIVAVALLHKHCRESFMKTLGEFIVEKQHEFSHATGELTALLSAIKLGAKIIHRDINKAGLVDILGASGAENVQGEVQQKLDLFANEKLKAALKARDIVAGIASEEEDEIVVFEGCEHAKYVVLMDPLDGSSNIDVNVSVGTIFSIYRRVTPVGTPVTEEDFLQPGNKQVAAGYVVYGSSTMLVYTTGCGVHAFTYDPSLGVFCLCQERMRFPEKGKTYSINEGNYIKFPNGVKKYIKFCQEEDKSTNRPYTSRYIGSLVADFHRNLLKGGIYLYPSTASHPDGKLRLLYECNPMAFLAEQAGGKASDGKERILDIIPETLHQRRSFFVGNDHMVEDVERFIREFPDA

SEQ ID NO: 1860 - protein, 849 aa, Schizosaccharomyces pombe
MPSGAQGNTQSAAYKRIVNVSRNFQFKAALNKDTREWTFQHRSSGTALYSAIASLGDPSSPWDAVYVASPGPVQISEGNDHTVETKIDEAAVVHRSSSIVISPEDQEIFLKKATEYYRKKNIEADIVPVWGKVQRVPQAKSSSATITPSVSNKLSTAYQSIKSEALKDGPMYADSVLWDVLHYRIPTLDGYQQHNLWKNFTRWSQYFADNIVSNYRPGDLILIHDYSLFLLPRLIRKQLSDAPIVFFLHAPFCTSEVFRCLSKRAEILKGVLASNVIAMQTDSYTRHFLSTCSNVLGLETTSTHIDTSDGFRVVVFSSHVSIDVPRVYSRCNSKPVSLKIQQLKSLYPSDKKLIVGRDQLTKACGVTHKLRAFRELLIHFPKWRGHVVLIQITSLPVGNNYSNEELKKTENLVAQINSEFGSLDYTPVIHFHQLLDPDEYYALLSVANIACVSSVRDSMNTMALEYVACQQKNKGSLILSEFSGTAELLLSAYLVNPYDYSRFAETINYCLNMTEKERERRFSSLWKQATSQSSQQWIYKLINRAAYEVKALESHMTTPLLTYNILIKPYRNAKRRLFLLDYDGTLIESARNSIDAVPTDRLLRTLKRLASDSRNIVWILSGRSQKFMEEWMGDISELGLSSEHGSAIRPPLAGSWSSCAENLDLSWKDTVRDFFQYYVERTPGSYIEEKKHSISWCYQNANTTYSKFQSLECQTNLEDMLKHYDVEISPAKSFLEVHPNYLNKGSIVRRILKRSGSVDFVFCAGDDKTDENMFEVFLPTAFSNSHLIDEIDSTEYSGSHHTDDNSDANKVENVKVATFRVHIGLTDKPTLSDYHLPAPRDLGELLHNL

SEQ ID NO: 1861 - protein, 646 aa, Leptospira interrogans
MSKEKIIGIDLGTTNSVVSVMEGGDPVVIQNSEGARTTPSIVAFTAKGETLIGQFAKNQAITNAVNTIRSAKRFIGRRLNECESEMKHVSYKVIRSGNEGVKFETSAGEFTPQEISARVLMKMKQTAEDYLGQKVTKAVITVPAYFNDEQRQATKDAGRIAGLEVERIINEPTAAALAYGFDKKNVNSKIAVYDLGGGTFDISILELADGVFEVKSTNGDTHLGGDDFDMAIMEWMISEFKNQTGIDISADKNTVQRLKEAAEKAKIELSGTMSTQINLPFITADASGPKHLDMTLTRAKFDQLTKSLVDRTRIPCENALRDAGLKASDINEVILVGGSIRIPAVQELVKQVFGKEPNKSVNPDEVVAIGAAIQGGVLAGEVSDVLLLDVTPLSLGIETLGGVMTKLIERNTTIPTKKSQVFSTAADNQSAVSIHVLQGEREMASANRTLGRFDLIGIPPAPRGVPQIEVTFDIDANGIVHVSAKDLGTGKEQKIRIESSSGLSEDEIQKMVKDAEAHAAADKAQREVIEAKNELDTLTYSLEKTVNEAGDKIGANEKQLATDEIKRAREAIESNDKARIESAKASISKIATDIASKVYSQSAPGAEQAAAGGPNGSAGSNDQGNSTNNGEKVVDADYTVVDDEKK

SEQ ID NO: 1862 - protein, 652 aa, Ralstonia solanacearum
MGKIIGIDLGTTNSCVSIMEGNTPKVIENAEGARTTPSIIAYMEDGEILVGAPAKRQAVTNPRNTLYAVKRLIGRKFEEKEVQKDIGLMPYTISKADNGDAWVEVRDKKMAPPQISAEVLRKMKKTAEDYLGEEVTEAVITVPAYFNDSQRQATKDAGRIAGLDVKRIINEPTAAALAFGLDKNEKGDRKIAVYDLGGGTFDISIIEIADVDGEKQFEVLSTNGDTFLGGEDFDQRIIDYIIGEFKKESGVDLSKDVLALQRLKDAAEKAKIELSSTQQTEINLPYITADASGPKHLNLKITRAKLEALVEDLIARTIEPCRTAIKDAGVKVSDIHDVILVGGMTRMPKVQEKVKEFFGKEARKDVNPDEAVAVGAAIQGQVLGGDRKDVLLLDVTPLSLGIETLGGVMTKMIGKNTTIPTKFSQTFSTADDNQPAVTIKVYQGEREMASGNKMLGEFNLEGIPPAPRGTPQIEVSFDIDANGILHVGAKDKATGKENKITIKASSGLSEAEIERMVKDAEANAEEDKKLRELVDSRNQGEALVHSTRKALGEYGDKLEAGEKDKIEAAIKDLEDVLKGSDKAAIDAKVEALATASQKLGEKVYADMQAKGGAEAGAEQAAAGAHAGAQAGHGAPQDDNVVDAEFKEVNDKK

SEQ ID NO: 1863 - protein, 122 aa, Fusobacterium nucleatum
MAFNKEQFIADLEAMTVLELKELVSALEEHFGVTAAAPVAVAAAGGATEAAEEKTEFDVVLKSAGGNKIAVIKEVRAITGLGLKEAKDLVDNGGVIKEAAPKDEANAIKEKLTAAGAEVEVK

SEQ ID NO: 1864 - protein, 374 aa, Leptospira interrogans
MSFHFQTFYGIFSLEFTDPQKNSVGIIFLEESMSVHPTQTLSLSQYLIEEQLKLPQATGDFTALMSHLVYAAKIVSREVRKAGLLENILGATETVNVQGETQMKLDEYADKVFNHTLTRSGHLCILGSEEHEETVPVPNGYKIGKYTIAIDPLDGSSNIDANVSIGTIFSVHLRKSPAGTPGTLSDLLQQGSGQRAAGYVLYGSSTMLILCTGKGVSGFTLDPSCGEFILSHPDMQIPETGGIYSINEGNYNYWSDEVKNYIRDIKSIEGGRKPQSGRYIGSLVADFHRNLLKGGIFLYPNDTKSTKYPNGKLRLLYEAAPMAFIAEQAGGMAVTVYGERILDLTPKELHERTTLVVGSKKEVEHFLKFAPKKS

SEQ ID NO: 1865 - protein, 420 aa, Leptospira interrogans
MAKKTPGNNGKQKLFCSFCGKEQDAVKRLVAGPGVYICDECISLCNEIIAEDHEHSHEKSEVFSEVPSPADIKSILDQYVIGQDHAKKALSVAVYNHYKRVNLKEKKSDVEIEKSNILLIGPTGSGKTLLAQTLARIIKVPFAIVDATALTEAGYVGEDVENIILKLIQNADNDIKKAEVGIIYIDEVDKIARKSDSASITRDVSGEGVQQALLKIIEGTVANVPPQGGRKHPHQEYLQVDTKNILFILGGAFVDLPNIIKSRTGIKTIGFGSEEQRIQSENKDVLMEQVIPEDLIKFGLIPEFIGRLPIVATLQELNVDMLRQIFREPKNSVLKQYTRLLELENVKLTFHDEAIDKIAELAIKRESGARGLRAIVENIMLDLMFDIPSRKDIEEVIITAEVIANRVAPTLILKKESKIA

SEQ ID NO: 1866 - protein, 478 aa, Leptospira interrogans
MPCMKILNRKKTKIVCTIGPASSSEETILSILKAGMDIARMNFSHGTHDSHKRVYDTLRKCEQIFGFPLGIMADLQGPKIRTGKLKLNSILLHKNQEIEIVPDSDILGDEHKIGCTYPNLIRDIQEEDKILIDDGKLILKVISKKSNSAILKVIVGGILWSNKGINLPGTPISAPALSEKDIEDLKFALSLGVDYAALSFVRTGADLELARSYLEGTYTGLIAKIERPEAIGNIEEIIERADGIMIARGDLGVEIDTEKVPILQKELIYKLNQAGKPVITATQMLESMIENPRPTRAEASDVANAVMDGTDAVMLSAESANGHYPVESVEIMSKIIQETETIDHIYEIHWNIKKTFLESERTALGNAAREIAHGIHAKAIVNFTRSGYSALITSEMRPKVPIYSFTPFATTARKMKLYRGVVPFVMPFFTRLEDMIAYMNQKLKEDEFLFPGDKVVILSGAPGTTVRSVDFLQVYKIH

SEQ ID NO: 1867 - protein, 586 aa, Thermotoga neapolitana
MRILEINGPVVKVDNTGDLSMHEMVYVGKLGLIGEIIALRGKIAIVQVYEETSMLEPGEPVERTGKMLSVVLGPGLLGNIYDGIQRPLRTLLEKAGPFMKRGVRAFGLDTDKFWSVSVLKREGERVRGGDVIAEVQETNSIRHRIMVPPHIKEGTLVNVRQSGDYRVTDTIAVVKTEDGMEEIKLYQEWPVRVPRPVKRFLEPTVPLITGQRVIDIFFPISKGGTAAIPGGFGTGKTITQHQLAKWADTDVVVYIGCGERGNEMTEVLEEFPQLQDPRTGKPLMDRTILIANTSNMPVSAREASIYTGITIAEYFRDMGYNVALMADSTSRWAEALRELSGRLEEMPVEEGYPSYLATRIAQFYERAGLCENLNGTVGSVTIIGAVSPPGGDFSEPVTQHTKRFVRCFWALDRNLAYSRHYPSINWITSYSEYVETLEDWFKDNVDPEWPRYREDALRILIEDDRLQQIIKIMGEDVLPDDQKLTVLVARIIKTGILQQNAFSKVDSFCPLEKQFKILKLIVDTYYNARKMLEKAIPVGKILPPEIVSKLSTLKESDHFDEELAEIEKTLTDHFEELEKLYPNKAR

SEQ ID NO: 1868 - protein, 860 aa, Oryza sativa
MVSRSYSNLLDLATGAADQAPAPAALGALRRRLPRVVTTAGLIDDSPLSPSTPSPSPRPRTIVVANHLPIRAHRPASPSEPWTFSWDEDSLLRHLQHSSSSPAMEFIYIGCLRDDIPLADQDAVAQALLESYNCVPAFLPPDIAERYYHGFCKQHLWPLFHYMLPLSPDLGGRFDRALWQSYVSANKIFADKVLEVINPDDDFVWVHDYHLMVLPTFLRKRFNRIKLGFFLHSPFPSSEIYKTLPVREELLRALLNSDLIGFHTFDYARHFLSCCGRMLGLSYESKRGHICLEYYGRTVSIKILPVGVNMGQLKTVLALPETEAKVAELMATYSGKGRVVMLGVDDMDIFKGISLKLLAMEELLRQHPEWRGKLVLVQVANPARGRGKDVDEVKGETYAMVRRINEAYGAPGYEPVVLIDEPLQFYERVAYYVVAEVCLVTAVRDGMNLIPYEYIVSRQGNEALDRMLQPSKPEEKKSMLVVSEFIGCSPSLSGAVRVNPWNIEAVADAMESALVLPEKEKRMRHDKHYRYVDTHDVGYWATSFLQDLERTCKDHAQRRCWGIGFGLRFRVVSLDLSFRKLAMEHIVMAYRRAKTRAILLDYDGTLMPQAINKSPSANSVETLTSLCRDKSNKVFLCSGFEKGTLHDWFPCENLGLAAEHGYFLRSSRDAEWEISIPPADCSWKQIAEPVMCLYRETTDGSIIENRETVLVWNYEDADPDFGSCQAKELVDHLESVLANEPVSVKSTGHSVEVKPQGVSKGLVARRLLASMQERGMCTDFVLCIGDDRSDEEMFQMITSSTCGESLAATAEVFACTVGRKPSKAKYYLDDTAEVVRLMQGLASVSNELARAASPPEDDDE

SEQ ID NO: 1869 - protein, 639 aa, Shewanella oneidensis
MGKIIGIDLGTTNSCVAVLDGGKARVLENAEGDRTTPSIIAYTDDETIVGQPAKRQAVTNPNNTFFAIKRLIGRRFKDDEVQRDVNIMPFKIIAADNGDAWVESRGNKMAPPQVSAEILKKMKKTAEDFLGEEVTEAVITVPAYFNDSQRQATKDAGRIAGLEVKRIINEPTAAALAYGIDKKQGDNIVAVYDLGGGTFDISIIEIDSNDGDQTFEVLATNGDTHLGGEDFDNRLINYLADEFKKEQGLDLRKDPLAMQRLKEAAEKAKIELSSTNQTEVNLPYITADATGPKHLVVKITRAKLESLVEDLIIRTLEPLKVALADADLSVSDINEVILVGGQTRMPKVQEAVTNFFGKEPRKDVNPDEAVAVGAAIQAGVLSGDVKDVLLLDVTPLSLGIETMGSVMTKLIEKNTTIPTKAQQVFSTADDNQSAVTIHVLQGERKQASANKSLGQFNLDGIEPAPRGMPQIEVMFDIDADGILHVSATDKKTGKKQNITIKASSGLSEEEVAQMVRDAEAHAEEDKKFEELVQSRNQADGLVHATKKQVEEAGDALPSEDKAKIEAAMSAVETAVKGNDKEAIEKATQALIEASAKLMEIAQAKAQTQGGAQEGAAKQSNATADDVVDAEFEEVKDDKK

SEQ ID NO: 1870 - protein, 426 aa, Shewanella oneidensis
MGDNKNNGDSGKLLYCSFCGKSQHEVRKLIAGPSVYVCDECVELCNDIIREEIKEISPKRDNDKLPTPHELRAHLDDYVIGQDRAKKVLSVAVYNHYKRLKNSSPKDGVELGKSNILLIGPTGSGKTLLAETLARSLNVPFTMADATTLTEAGYVGEDVENIIQKLLQKCDYDVEKAQRGIVYIDEIDKISRKSDNPSITRDVSGEGVQQALLKLIEGTVAAVPPQGGRKHPQQEFLQVDTSKILFICGGAFAGLEKVIEQRAHVGSGIGFGAQVKGEKDKATISETLSQVEPGDLVKYGLIPEFIGRLPVVATLTELDEEALVQILSEPKNALTKQYNALFEMEGVELEFREDALKAIAHKAMSRKTGARGLRSIVEGILLDTMYDIPSIDGVVKAVVDESVVNGESAPILIYERNETQVASGEQ

SEQ ID NO: 1871 - protein, 479 aa, Shewanella oneidensis
MFRRTKIVTTLGPATDRDDNLRRIIAAGANVVRLNFSHGSPEDHLKRATQAREIAKELGVHVAILGDLQGPKIRVSTFKDNKKIQLKLGQTYILDAELAKGEGDENQVGIDYKQLPDDVNVGDILMLDDGRVQLRVERVEGRKVHTTVTVAGPLSNNKGINKQGGGLSAAALTEKDKADILTAAMIQVDYLAVSFPRSGADLEYARSLAQQAGSNALIVAKVERAEAVASDEAMDDVILASDVVMVARGDLGVEIGDAALVAVQKKLIARSRQLNKIVITATQMMESMISSPMPTRAEVMDVANAVLDGTDAVMLSAETAAGDFPEETVKAMANVCVGAESHPSVKVSKHRLDARFTSVEETIALSTMYAANHLEGVKAIIALTESGATPKLMSRISSSLPILGLSRHDTTLAKMALYRGVLPIYFDSTIYPADELAQKALESLTKAGYLHSGDLVLMTKGDAMETIGGTNTCKVLIVA

SEQ ID NO: 1872 - protein, 412 aa, Shewanella oneidensis
MSKRRVVVTGLGLVTPVGNTVDTTWKALLSGKSGIAPITKFDASEFTTRFSGSVKDFDVEQYLTKKDARKMDLFIQYGMAAGIQAIQDSGLDMSKVNPGRVGTAIGAGMGGMWLIEQNHSALMNGGPRKISPFFVPSTIINMIAGHLSIMYGMTGPNFAVTTACTTGVHNIGFAARTIAYGDADVMVAGGAEDVTCPLGVGGFGAAKALSTRNDDPTAASRPWDKDRDGFVIGDGAGVMVMEEYEHAKARGATIYGELVGFGMSGDAFHMTSPPSDGAGAAAAMVNAVNDAKLPLEKIGYINAHGTSTPAGDKAEAAAVKSVFGDHAYNLLVSSTKSMTGHLLGAAGAVEAIFTLLALRDQAVPPTINLDNPDEGCDLDFVAHTARDVKLDYALCNSFGFGGTNGSLLFKKV

SEQ ID NO: 1873 - protein, 325 aa, Shewanella oneidensis
MQTLAQHLTSKAVNESLAQLILTLADTSKAISHAVRHGALAGVLGATEQENVQGETQKKLDIITNDMLKDALKADGTVRGLASEEEDHVVEVSANGQYLVCFDPLDGSSNIDINSLVGTIFSVLPAPQGELTEASFLQSGRNQLAAGYVLYGPSTMLALTTGQGVQLFTLHPETNEFLLTNATMSISPDTSEFAINMSNQRFWEAPMQTYIADLLLGKIGPREKSFNMRWIAAMVGDVHRVLSRGGIFTYPTDNKDPKKPYKLRLMYEANPMAFLVEQAGGKASTGYETILDIQPTQIHQRVAVILGSANEVDACLSYHGIDSRK

SEQ ID NO: 1874 - protein, 410 aa, Streptococcus mutans
MAGNRTNDVTVHCSFCGKNQDEVKKIIAGNGVFICNECVELSQEIIREELAEEVLADLSEVPKPKELLAILDSYVIGQDRAKRALAVAVYNHYKRISFTESQDDQDVDLQKSNILMIGPTGSGKTFLAQTLAKSLNVPFAIADATALTEAGYVGEDVENILLKLIQAADYNVERAERGIIYVDEIDKIAKKGENVSITRDVSGEGVQQALLKIIEGTVASVPPQGGRKHPQQEMIQIDTKNILFIVGGAFDGIEDIVKQRLGEKIIGFGQNNKKIDDQSSYMQEIISEDIQKFGLIPEFIGRLPVLAALEQLTVDDLVKILTEPKNALVKQYQTLLSYDGVELEFDQEALQAIAQKAIERKTGARGLRSIIEETMLDLMFEIPSQEDVTCVRITKKAVEGTDKPILETAS

SEQ ID NO: 1875 - protein, 500 aa, Streptococcus mutans
MNKRVKIVATLGPAVEIRGGKKFGEDGYWGEKLDVEASAAKIAELITEGANVFRFNFSHGDHAEQGERMATVRRAEELARQKVGFLLDTKGPEMRTELFADGVKEYEYKTGDKLRIATKQGIESTKDVIALNVAGGLDIYDDVAVGQTILIDDGKLGLTVTAKDITTREFEVTVENDGIIAKQKGVNIPNTKIPFPALAERDNADIRFGLEQGLNFIAISFVRTAKDVNEVRQICKETGNEHVKLFAKIENQQGIDNIDEIIDAADGIMIARGDMGIEVPFEMVPVYQKMIITKVNAAGKSAITATNMLETMTDKPRATRSEVSDVFNAVIDGTDATMLSGESANGKYPVEAVRTMATIDKNAQTLLNEYGRLNSDNLPRTNKTEVVASAVKDATKSMDIKLVVTITESGNTARLISKYRPDADILALTFDEKVQKSLMINWGVIPILTEKPASTDDMFEIAEKAALKSGLVESGDNIVIVAGVPVGSGGTNTMRVRTVQ

SEQ ID NO: 1876 - protein, 410 aa, Streptococcus mutans
MTLKRVVVTGYGVTSPIGHTPEDFWNSLHDGKIGIKPITKFDASEIPVFNAGEIQDFPFDKYFVKKDKNRMDTYSLYAIYAAMEAIENAALDMAQEIRDRVGVIVSSGIGGLQELEDQIIRMHERGMKRIKPMFIPKALSNMGAGNIALKIGAQGVCKSITTACASANDAIGEAFREIKYGFHDVILAGGSEASITKIGIGGFNALTALSTTEDPARSAIPFDKDRNGFVMGEGAAVLILESLEHAQKRGARILAEVVGYGSNCDAYHMTTPTPDGSGAAKAIKLAINEAGISPEEVNYVNAHGTSTQANEKGESKAIVAVLGKDVPVSSTKSFTGHLLGAAGGVEAIATIEAIRNHFVPMTAGTKELSEDIEANVVYGQGQEAVIKYAISNTFGFGGHNAVLAFKRWED

SEQ ID NO: 1877 - protein, 331 aa, Rhodobacter capsulatus
MAIELEGLGLSPELADVMTRLARVGADLARTIARNGVETDLAAGVGTNAGGDGQKALDVMADDAFREALTGTAVAYYASEEQDEVVTLGKGTLALAIDPLDGSSNIDVNVSIGTIFSIFPATDDPNTSFLRKGSEQIAGGYIIYGPQCALVCSFGRGVHHWVLDLDSRSFKRLPDIKALPQDTSEYAINASNYRHWPSPIRAFIDDLVAGAEGPRGRNFNMRWIASLVAETHRILMRGGVFLYPGDERKGYARGRLRHVYECAPIAFLITQVGGGATDGCEDILSALPDKLHARTPFVFGCAAKVARVTAYHDLPGQETSAPFNTRGLFRS

SEQ ID NO: 1878 - protein, 924 aa, Oryza sativa
MENTCKRISNTPNSMPVLQGWADLPDDLLQCVLALLSSPSDLAAFIATCPNWHAAFRSAKSTLRTTLFRPLAIRSCASSGDDPVVWELFDPAKPTICIHRVTPPDFLAGMDYECCSYGHAIFSGNAPSLKDTTFAIVDVFTGTSVSPPPCPFFTFVNSCALTAPLDYHNSHFLVEAKHSLFAWRVGSDHWSQCSCPPNSKALEQFVPFKGQLYALEYQQLYTVKLEPQLSLEEVQVVWSVEMSEPDLCEPSLVVCDDMLILLAASIGEAFCLDLSSQPAMWVKMEEEELKEWAFFFDEKREAFRPRPPLSCKNPQRWGGIGYDSYSWFFQREKAFSGFQLFQLAENMHVQRHMLLYSWIHEDDFDGPEAFQDQMDDEVSYAAHKSQPVSVPTCQYLCFDFLTHPNSFSPHHRAPAMAPYPLPPPSPPQQQLPPASSSKPRRPPPHRSHGGYKNGTVSVDSGAPHDARGLRALIKALAAEHGEAAPAVHAHAAKLGLDRRRAVRDGLVELYLARGELASARALVDGFPAGRDVVSCTAMVTGHARHGFLDEAVVLFFAMADDRCVAIDAVAAAAAFSACAQIGDLALGREAHRRVAERKVAMDVVAWNALVDMYAKCGDAAAAHRWFRRMPVKKNVVSWNTMMSAFARAGELEEALALFQEMQAAAVRPDDATFVAALGACAQLGALDTGRWLHAYMGRMGHSADGVVGNALLDMYAKCGAVDQATEVFDGMARRDVYTYTSMILGLAMHGRGEDALSLFAGMQRAGVTPNEVTLLGVLTACCHAGLVEEGLQQLNAMPEPRIEHYGCVVDMLGRAGRLDKAEELIAAMPVHSDALIWSSLLAACRAHGDVERAERVMRRRVADADAGDYVLMSNTYASNGRHGEAVKVRGQMRRNEIDKVPGCSLIEIDGVVHEFKAIPANSIR

SEQ ID NO: 1879 - protein, 293 aa, Oryza sativa
MEQYEEEKIGEGTYGVVYKARDKVTNETIALKKIRLEQEDEGVPSTAIREISLLKEMHHRNIVRLHDVIHSEKRIGLVFEYLDLDLKKFMDSCPEFAKNPTLIKSYLYQILRGVAYCHSHRVLHRDLKPQNLLIDRRTNTLKLADFGLARAFGIPVRTFTHEVVTLWYRAPEILLGSRQYSTPVDMWSVGCIFAEMVNQKPLFPGDSEIDELFKIFRVLGTPNEQSWPGVSSLPDYKSAFPKWQAQALATIVPTLDPAGLDLLSKMLRYEPNKRITARQALEHEYFKDLEMER

SEQ ID NO: 1880 - protein, 564 aa, Aspergillus nidulans
MAPSGKGSSSSEDAQLGAVFSVSGPVVVAENMIGCAIAGLTVGDPVMRTGKPLSVELGPGLMETIYDGIQRPLKAISDESGSIYIPRGIKVNALDRKKKWDFKPGKYKVGDHITGGDIWGTVFENSLLNDHKILLPPRAKGTITRIAEAGSYTVEEQLLEIEFNGVKTTHGMMHTWPVRVPRPVNEKQSADSPFIVGQRVLDSLFPSVLGGTVCIPGAFGCGKTVISQSVSKFSNSDVIVYVGCGERGNEMAEVLMDFPELSIDIGGRKEPIMKRTCLIANTSNMPVAAREASIYTGITIAEYFRDQGKNVAMMADSSSRWAEALRELSGRLGEMPADQGFPAYLGAKLASFYERAGKSTALGSPEREGSVSIVAAVSPPGGDFSDPVTTSTMSIVQVFWGLDKKLAQRKHFPSINTGISYSKYTPVLDRYYEKHHPEFPRLREQVRELLSKSEDLDQVVQLVGKAALGDSDKITLDVAAMVKDDFLQQNGYSDYDQFCPLWKTEYMMKAFMGYHDEAQKAIAQGQSWPKVRDATTDIQTSLRNMKFEVPDNQEEVSAKVRTID

SEQ ID NO: 1881 - protein, 1039 aa, Arabidopsis thaliana
MTHHHRRESFSVTPSTMGGSVVLCPNTDLLWPFGKLEGLDRDDIRETAYEIFFTACRSSPGFGGRTALTFYSNHNSNDHHGDGGGGIGSGGSTGVGSGFGSSGRKEVVTTPTSRVKRALGLKMLKRSPSRRMSTIGAAGGAATSLSPGGMNSSAGHISPGAGFLTVQPSRPRRPLTSAEIMRQQMKVTEQSDSRLRKTLLRTLVGQTGRRAETIILPLELLRHLKTSEFGDIHEYQLWQRRQLKVLEAGLLLHPSIPLDKTNNFAMRLREVVRQSETKPIDTSKTSDTMRTLTNVVVSLSWRGTNGNPTDVCHWADGYPLNIHLYVALLQSIFDVRDETLVLDEIDELLELMKKTWSTLGITRPIHNLCFTWVLFHQYVVTSQMEPDLLGASHAMLAEVANDAKKLDREALYVKLLNSTLASMQGWTEKRLLSYHDYFQRGNVGLIENLLPLALSSSRILGEDVTISQGKGQEKGDVKLVDHSGDRVDYYIRSSIKNAFSKVIENTKAKIAATDEGEEAAGTLLQLAKETEELALRERECFSPILKRWHSVAAGVASVSLHQCYGSILMQYLAGRSFISRDTVEVLQTAGKLEKVLVQMVAEDSEECEDGGKGLVREMVPYEVDSIILRLLRQWVEEKLKAVQECLFRAKETETWNPKSKSEPYAQSAGELMKLAKDTIDEFFEIPIGITEDLVHDIAEGLEQLFQEYTTFVASCGARQSYIPTLPPLTRCNRDSRFVKLWKRATPCTTSNEDLKYTTSVISDGHHPRPSTSRGTQRLYIRLNTLHFLSSHIHSLNKTLSLNPRILPATRKRYRHRNNNSSSYFDFTYAGIESACQHVSEVAAYRLIFLDSNSVLYESLYVGEVANARIRPALRIMKQNLTLMSAILADRAQSLAMREVMKSSFEAFLMVLLAGGYSRVFYRSDHSIIEEDFENLKRVFCTCGEGLIPEEVVDREAETVEGVIQLMSQPTEQLMEDFSIVTCETSGMGMVGSGQKLPMPPTTGRWNRSDPNTILRVLCHRNDRVANQFLKKSFQLPKRR

SEQ ID NO: 1882 - protein, 507 aa, Beta vulgaris
DRGSPCLIMGDYNETLIPAERGSHLISSQGARDFQNFINNMGLIEISPIKGFFTWFRGQSKSKLDRLFVQPEWLTSFPSLKLNILKRSPSDHCPLLAFSSHQNWGPKPFRFLNCWLTHPQCMKIISEIWTKNHNSSVPDKLRTLKEALKQWNQKEFGIIDDNIKHCEEKIHFLDNIANSRLLCTNELQERDDAQLNLWTWLKRSESYWALNSRARWIKEGDSNTRYFHTLATIRRHKNHLQYIKTEGKNISKPGEIKEEAVAYFQHIFAEEFSTRPVFNGLNFNKLSESECSSLIAPFTHEEIDEAVDSCDAQKAPGPDGFNFKFIKSSWEVIKKDIYKIVEDFWASGSLPHGCNSAFIALIPKTQHPRGFNEFRPISMVGCLYKIIAKILARRLQRVMDHLIGPYQSSFIKGRQILDGVLIASELIDSCRRMKNEAVVLKLDFHKAFDSISWNYLEWVLCQMNFPLVWRSWIRSCVMSASAAVLINGSPSSVFKLQRGLRQGDPLS

SEQ ID NO: 1883 - protein, 592 aa, Solanum tuberosum
KPPHTDVGCLPTVNAVTIHNPAVPFNSPESTLGRHLARRLVQVGVTDVFGVPGDFNLTLLDHLIDEPGLNFVGCCNELNAGYAADGYARARGVGACVVTFTVGGLSVLNAIAGAYSENLPLICIVGGPNSNDYGTNRILHHTIGLPDFTQELRCFQTVTCYQAVVNNLEDAHELIDTAISTSLKESKPVYISISCNLPGIPHPTFSREPVPFFISPRLSNKMGLEAAVEAAAEFLNKAVKPVIVGGPKMRVAKACDAFVELADASGYAVAVMPSAKGMVPEHHPHFIGTYWGAVSTAFCAEIVESADAYLFAGPIFNDYSSVGYSLLLKREKAIIIQPDRVTVGNGPTFGCILMKDFLAALGKRLKHNPTAYENYRRIYVPEGHPLKCEPKESLRVNVLFEHIQRMLSGDTAVIAETGDSWFNCQKLKLPKDCGYEFQMQYGSIGWSVGATLGYAQAAKEKRVIAFIGDGSFQVTAQDISTMLQCGQRTIIFLINNGGYTIEVEIHDGPYNVIKNWNYTGLVDAIHNGQGKCWTTKVRCEEELVEAIETATETKKDSLCFIEVIVHKDDTSKELLEWGSRVSAANSRPPNPQ

SEQ ID NO: 1884 - protein, 613 aa, Acetabularia acetabulum
MSKAKEGDYGSIKKVSGPVVVADNMGGSAMYELVRVGTGELIGEIIRLEGDTATIQVYEETSGLTVGDGVLRTKQPLSVDLGPGILGNIFDGIQRPLKAIADVSGDVFIPRGVNVPSLDQTKQWEFHPSSYRVGDRVTGGDIIGTVPENTLLDHKVMLIPQAKGTITYIAPAGNYNINERIIEVEFQGTKYEYCMKQSWPVRSPRPVVEKLLADTPLLTGQRVLDSLFPGVRGGTCAIPGAFGCGKTVISQALSKYSNSDGIVYVGCGERGNEMAEVLMDFPQLTMTMPDGREESIMKRTTLVANTSNMPVAAREASIYTGITLSEYFRDMGYNFAMMADSTSRWAEALREISGRLAEMPADSGYPAYLGARLASFYERSGRVACIGSPEREGSVTIVGAVSPPGGDFSDPVTSATLGIVQVFWGLDKKLAQRKHFPSVNWLISYSKYLNALEPFYEKFDNDFVDIRQVAREVLQKEDELNEIVQLVGKDALAESDKIILETADFLKEDYLAQNSFTKYDKYCPFYKSVGMMRNIVTFHRLATQAIERTATGNSDGQKLLSNIIKAKLGDLLYKVSSQKFEDPSDGESVVTGRLNELNDELKEKFRALEDEYS

SEQ ID NO: 1885 - protein, 623 aa, Beta vulgaris
MPAVYGDRMTTFEDSEKESEYGYIRKVSGPVVVADGMNGAAMYELVRVGHDNLIGEIIRLEGDSATIQVYEETGGLTVNDPVLRTHKPLSVELGPGILGNIFDGIQRPLKTIAKRSGDVYIPRGVSVPPLDKDTQWDFQPKKLGVGDLLTGGDLYAIVDENSLMQHHVVLPPDAMGKITYIAPAGNYTIQDTVLELEFQGVVKKFTMLQTWPVRTPRPVASKLAADTPLLTGQRVLDALFPSVLGGTCAILGAFGCGKTVISQALSKYSNSDAVVYVGCGERGNEMAEVLMDFPQLTMTLPDGREESVMKRTTLVANTSNMPVAAREASIYTGITIAEYFRDMGYNVSMMADSGSRWAEALREISGRLAEMPADSGYPAYLAARLASFYEAAGKVKCLGGPERNGSVTIVGAVSPPGGDFSDPVTSATLSIVQVFWGLDKKLAQRKHFPSVNWLISYSKYSGALESFYEKFDSEFIDIRTKAREVLQREDDLNEIVQLVGKDALAETDKITLDTAKLLREDYLAQNAFTAYDKFCPFYKSVWMMRNIIHFYNLANQAVERGAGSDGQKITYSLIKLRLGDLFYRLVSQKFEDPAEGEDALVAKFKKLNEDLTAAFRNLEDETR

SEQ ID NO: 1886 - protein, 580 aa, Hordeum vulgare
ELVRVGHDSLIGEIIRLEGDSATIQVYEETAGLTVNDPVLRTKKPLSCELGPGILGNIFDGIQRPLKTIAIKSRDVYIPRGVSVPALDKDQLWEFQPNKLGVGDNITNGDLYATVFENTLMKHHIALPPGAMGKISYIAPAGQYSLQDTVLELEFQGIKKEFTMLHTWPVRTPRPVASKLAADTPLLTGQRVLDALFPSVLGGTCAIPGAFGCGKTVISQALSKYSNSDTVVYVGCGERGNEMAEVLMDFPQLTMTLPDGREESVMKRTTLVANTSNMPVAAREASIYTGITIAEYFRDMGYNVSMMADSTSRWAEALREISGRLAEMPADSGYPAYLASRLASFYERAGKVQCLGSPDRTGSVTIVGAVSPPGGDFSDPVTSATLSIVQVFWGLDKKLAQRKHFPSVNWLISYSKYSTALEGYYEKFDPGFIDMRTKAREVLQREDDLNEIVQLVGKDALGESDKITLETAKLLREDYLAQNAFTPYDKYCPFYKSVWMMRNIIHFNQLANQAVERAANADGHKITYAVVKSRMGDLFYRLVSQKFEDPAEGEDVLVAKFQKLYDDLTAGFRNLEDEAR

SEQ ID NO: 1887 - protein, 344 aa, Synechococcus sp.
MAQSTTSETHTRDLDRDCTTLSRHVLEQLQSFSPEAQDLAALMQRIGLAAKLIARRLSHAGLVDDALGFTGEINVQGEAVKRMDVYANQVFISVFRQSGLVCRLASEEMEKPYYIPENCPIGRYTLLYDPLDGSANVDVDLNVGSIFAVRRQEFYDESHEAKDLLQPGDRQIAAGYVLYGASTLLVYSMGQGVHVFVLDPSLGEFVLAQSDIQLPNSGQIYSVNEGNFWQWPEGYRQYIREMHRREAYSGRYSGALVADFHRILMQGGVFLYPETVKNPTGKLRLLYEAAPMAFLAEQAGGKASDGQKPILLRQPQALHERCPLIIGSAADVDFVEACLAESVP

SEQ ID NO: 1888 - protein, 402 aa, Glycine max
MAAATASTQLIFSKPCSPSRLCPFQLCVFDTKQVLSSGRRRHVGGSGVRCMAVGEAATTGTKKRSGYELQTLTSWLLKQEQAGVIDAELTIVLSSISMACKQIASLVQRANISNLTGVQGAVNVQGEDQKKLDVVSNEVFSNCLRSSGRTGIIASEEEDVPVAVEESYSGNYIVVFDPLDGSSNIDAAASTGSNFWIYSPNDECLADIDDDPTLDTTEQRCIVNVCQPGSNLLAAGYCMYSSSIIFVLTLGNGVFVFTLDPMYGEFVLTQENLQIPRAGKIYAFNEGNYQLWDEKLKKYIDDLKDPGQSGKPYSARYIGSLVGDFHRTLLYGGIYGYPRDKKSKNGKLRLLYECAPINFIVEQAGGKGTDGLQVLRLQGTEIHQRVPLYIGEEVEKVEKYLA

SEQ ID NO: 1889 - protein, 508 aa, Nicotiana tabacum
MAIENNNNGVNFCTVKRPKTKIVCTLGPASRSVPMIEKLLRAGMNVARFNFSHGSHDYHQETIDNLRQAMESTGILCAVMLDTKGPEIRTGFLKDAKPVQLKQGQEITISTDYSIKGDESMICMSYKKLAEDVKPQSVILCADGQITFTVLSCDKENGLDRCRCENTAVLGERKNVNLPGVIVDLPTLTDKDKDDILNWGVPNHIDMIALSFVRKGSDLVEVRKLLGEHAKNILLMSKVENQEGVANFDDILLNSDAFMVARGDLGMEIPIEKIFLAQKVMIYKCNIQGKPVVTATQMLESMIKSPRPTRAEATDVANAVLDGTDCVMLSGETAAGAYPDLAVGTMAKICIEAESTIDYPDVFKRIMSNAPVPMSPLESLASSAVRTANSAKAALILVLTRGGSTAKLVAKYRPGMPILSVVVPEIKTDSFDWTCSDESPARHSLIFRGLVPVLHAGSARASHEESTEEALDFALQHAKTKGLCKQGDSVVALHRVGTASVIKIVTVK

SEQ ID NO: 1890 - protein, 414 aa, Pseudomonas putida
MSRRRVVVTGMGMLSPLGTDVPSTWQGILAGRSGIGPIEHTDLSAYSTRFGGSVKGFEVEQYLSAKEARKLDLFIQYGLAAGFQAVRNAGLEVTDANRERIGVAMGSGIGGLTNIEETSRTLHDSGPRRISPFFVPGSIINMISGFLSIHLGLQGPNYAIATACTTGTHCIGMAARNIAYGEADVMIAGGAEMAACGLGMGGFGASRALSTRNDEPSRASRPWDKGRDGFVLSDGAGALVLEELEHAKARGATIYAELVGFGMSGDAYHMTSPPDSGEGAARCMANALRDAGIQPEEVSYINAHGTSTPAGDVAEVAAIKRVFGEHAYKLAVSSTKSMTGHLLGAAGAVEAIFSVLAINSQMAPPTINLDEPDEGCDLDFVPHQARSMPIDVVLSNSFGFGGTNGSLVFRRFAG

SEQ ID NO: 1891 - protein, 336 aa, Pseudomonas putida
MSRVTLSRYLIEQTRSNNTPADLRFLIEVVARACKEISHHVSKGALGGVLGSMGTENVQGEVQKKLDVISNDILLEANEWGGHLAGMASEEMDNAYQIPGRYPKGAYLLVFDPLDGSSNIDVNVSVGTIFSVLRCPNQYLSQNESLNEEAFLQPGTEQVAAGYAIYGPQTMLILTLGNGVKGFTLDRELGSFVLTHENIRVPETTAEFAINMSNQRHWEAPVQRYVGELLAGETGPLKKNYNMRWIASMVADVHRILTRGGLFMYPRDAREPSKPGKLRLMYEANPMSFIIEQAGGASTNGYDRILDIKPESLHQRVSVILGSKEEVERVTAYHKE

SEQ ID NO: 1892 - protein, 496 aa, Pseudomonas putida
MVAGLLERLGVAAEAYTQGDYPVHTPIDGSQIASVKLLGKAETIARIDQAQSAFEAWRSVPAPRRGELVRLFGEVLREHKADLGELVSIEAGKITQEGLGEVQEMIDICDFAVGLSRQLYGLTIASERPGHHMRETWHPLGVVGVISAFNFPVAVWAWNTALALVAGNSVVWKPSEKTPLTALACQALFEKALKAFGDAPAGLAQLVIGGREAGEAMVDDPRVPLVSATGSTRMGREVGPRVAARFGRSILELGGNNAMILAPSADLDLAVRGILFSAVGTAGQRCTTLRRLIVHRSIKDEVVARVKAAYGKVRIGDPRKDNLVGPLIDKQSFDAMQGALAKARDEGGQVFGGERQLADQYPNAYYVSPAIAEMPAQSDVVRHETFAPILYVLAYDDFEEALRLNNEVPQGLSSCIFTTDIREAERFQSASGSDCGIANVNIGTSGAEIGGAFGGEKETGGGRESGSDAWKGYMRRQTNTVNYSRELPLAQGIVFD

SEQ ID NO: 1893 - protein, 517 aa, Aspergillus niger
MPSLENPTFQNEARLLLVSNRLPITIKRSDDGRYDFSMSSGGLVSGLSGLSKSTTFQWYGWPGLEVPEEEIPVVKERLKQEYNAVPVFIDDELADRHYNGFSNSILWPLFHYHPGEITFDESAWEAYKEANRLFAKAVAKEVQDGDLIWVHDYHLMLLPEMLREEIGDSKENVKIGFFLHTPFPSSEIYRILPVRNELLLGVLHCDLIGFHTYDYTRHFLSACSRLLGLTTTPNGIEFQGKIIACGAFPIGIDPEKFEEGLKKEKVQKRIAMLEQKFQGVKLMVGVDRLDYIKGVPQKLHALEVFLSDHPEWVGKVVLVQVAVPSRQDVEEYQNLRAVVNELVGRINGKFGTVEFMPIHFLHKSVNFDELIALYAVSDACIVSSTRDGMNLVAYEYIATQKKRHGVLVLSEFAGAAQSLNGSIIINPWNTEELAGAYQEAVTMSDEQRALNFSKLDKYVNKYTSAFWGQSFVTELTRISEHSAEKFHAKKASFSDNNSENGEPSNGVETPAQEQVAQ

SEQ ID NO: 1894 - protein, 480 aa, Aspergillus niger
MAANGSSSEGDHRLLIVSNRLPITIRRSGGGKYEFSMSSGGLVTGLSGLSKTTTFQWYGWPGLEVPEDEIDSVKQRLQEEFNATPVFMDDKLADRHYNGFSNSILWPLLHYHPGEIVFDEAAWDAYREANRLFAKTIAHEAREGDLVWVHDYHLMLLPEVLREELAALGKNNIRIGFFLHTPFPSSEIYRILPVRSQLLRGVLQCDLIGFHTYDYARHFLSCCSHILGLVTTPSSVKFKDRSVAVGAFPIGIDPDKFTEGLKSPKVQNRIASLENKFQGTKLMVSVDRLDYIKGIPQKLHALEVFLSQHPEWVGKVVLVQVAVPSRQDVEEYQNLRAVVNELVGRINGKFGTVDYMPIHFMHKSVSFDELIALYAASDACVVSSTRDGMNLVSFEYVATQQKRKGVLILSEFAGAAQSLNGSIVVNPWNTEELASAYHEAVSMSDDLRAQKFEKLYKYISKYTSAFWGKSFVAELSKCST

SEQ ID NO: 1895 - protein, 478 aa, Candida albicans
MVQGKVLVVSNRIPVTIKRLDNGSYDYSMSSGGLVTALQGLKKTTEFQWYGWPGLEIPEDEQTKVNDELKSKFNCTAIFLSDTIADLHYNGFSNSILWPLFHYHPGEMNFDENAWAAYIEANKKFALEIVKQVNDDDMIWVHDYHLMLLPEMLRQEIGNKKKNIKIGFFLHTPFPSSEIYRILPVRKEILEGVLSCDLIGFHTYDYARHFISSVSRIVPNVSTLPNGIKYQGRSISIGAFPIGIDVDNFIDGLKKDSVVERIKQLKSKFKDVKVIVGVDRLDYIKGVPQKLHAFEVFLNENPEWIGKVVLVQVAVPSRGDVEEYQSLRSTVSELVGRINGEFGTVEFVPIHYLHKSIPFDELISLYNISDVCLVSSTRDGMNLVSYEYIACQQDRKGVLILSEFAGAAQSLNGALIVNPWNTEDLSEAIKESLTLPEEKREFNFKKLFTYISKYTSGFWGESFVKELYKCNPQKSLRD

SEQ ID NO: 1896 - protein, 323 aa, Emericella nidulans
MENYQKIEKIGEGTYGVVYKARELTHPNRIVALKKIRLEAEDEGVPSTAIREISLLKEMNDPNIVRLLNIVHADGHKLYLVFEFLDLDLKKYMEALPVSEGGRGRALPDGSTLSRNLGLGDAMVKKFMAQLIEGIRFCHSHRVLHRDLKPQNLLIDRDGNLKLADFGLARAFGVPLRTYTHEVVTLWYRSPEILLGGRQYSTGVDMWSCGAIFAEMCTRKPLFPGDSEIDEIFKIFRILGTPDETIWPGVTSFPDFKPTFPKWKREDIQNVVPGLEEDGLDLLEALLEYDPARRISAKQACMHPYFQHGSSYYSGRARRNGFH

SEQ ID NO: 1897 - protein, 304 aa, Kluyveromyces lactis
MVAPSQFKQLEKVGNGTYATVYKGLNKTTGVYVALKEVKLDSEEGTPSTAIREISLMKELKHDNIVRLFDVIHTENKLTLVFEFMDNDLKKFMDNRNKGNPHKGLEMDLVKYFQWQLLQGVAFCHENRILHRDLKPQNLLINNRGQLKLGDFGLARAFGIPVNTFSSEVVTLWYRAPDVLMGSRNYCTLIDIWSCGCILAEMIMGKPLFPGSNDEEQLKLIFDTMGTPVEQTWPQVTQLAKYNPLLPPHMPRDLKQLLQNNTEEVLDDNVVDLLHGLLQLNPDARLSAKDALNHPWFAEYNHAN

SEQ ID NO: 1898 - protein, 589 aa, Lactobacillus delbrueckii
MKKTKIVSTLGPASNDIETITKLAEAGANVFRFNFSHGDHEEHLARMNMVREVEKKTGKLLGIALDTKGAEIRTTDQEGGKFTINTGDEIRVSMDATKAGNKDMIHVTYPGLFDDTHVGGTVLIDDGAVGLTIKAKDEEKRELICEAQNTGVIGSKKGVNAPGVEIRLPGITEKDTDDIRFGLKHGINFIFASFVRKAQDVLDIRALCEEANAPYVKIFPKIESQEGIDNIDEILQVSDGLMVARGDMGVEIPFINVPFVQKTLIKKCNALGKPVITATQMLDSMQENPRPTRAEVTDVANAVLDGTDATMLSGESANGLYPVESVQAMHDINVRTEKEMDTRNTLALQRFEEYKGSNVTEAIGESVVRTAQELGVKTIITATSSGYTARMISKYRPDATIVALTFDEKIQHSLGIVWGVEPVLAKQPSNTDEMFEEAARVAKEHGFVKDGDLVIIVAGVPFGQSGTTNLMKLQIIGNQLAQGLGVGTGSVIGKAVVANSAEEANNKVHEGDILVAKTTDKDYMPAIKKASGMIVEASGLTSHAAVVGVSLGIPVVVGAADATSKIADGSTLTVDARRGAIYQGEVSNL

SEQ ID NO: 1899 - protein, 471 aa, Yarrowia lipolytica
MAGVRFLDLVKPFTPFLPEVQAPERKVPFNQKIMWTAVTLMIFLVMSEIPLYGINSSDKSDALYWLRMMLASNRGSLMELGITPIVSSGMVFQLLGGTQLIEVNMDLKSDRELYQTAQKLFAIILSLGQATVYVLTGMYGPPKDLGVGVCLLLIFQLVLAALVVILLDELLQKGYGLGSGISLFIATNICEQIFWKAFAPTTVNKGRGYEFEGAIVAFVHLLFTRKDKKRAIIEAFTRQDLPNMSQLVTTVAIFAAVIYLQGFRVDIPVKSSKQRGPYGVFPIKLFYTSNLPIMLQSALTSNIFIISQMLFKKFPTNVLVRLLGVWDGREGMQQLFPVSGIAYYMQPPFNAKEALADPVKTVIYIAFVLGVCAVFSATWIEISGSSPRDVAKQFKEQGLVIAGRRETSAYKELKRIIPTAAAFGGATIGALSVASDLLGALSSGTGILMAVTTIYGYYEMTAKEGYVDAAN

SEQ ID NO: 1900 - protein, 776 aa, Thermoplasma volcanium
MGKIVRISGPVVVAEDIENAKMYDVVKVGEMGLIGEIIRIEGNRSTIQVYEDTAGIRPDEKVENTMRPLSVELGPGLLKSIYDGIQRPLDVIKETSGDFIARGLNPPPLDRKKEWDFVPAVKKNDIVYPGQVIGTVQETSLITHRIIVPDGVSGKIKSIYEGKRTVEDVVCTISTEHGDVDVNLMTTWPVRKARRVVRKLPPEIPLVTGQRVIDALFPVAKGGTAAVPGPFGSGKCVSGETPVYLADGKTIKIKDLYSSERKKEDNIVEAGSGEEIIHLKDPIQIYSYVDGTIVRSRSRLLYKGKSSYLVRIETIGGRSVSVTPVHKLFVLTEKGIEEVMASNLKVGDMIAAVAESESEARDCGMSEECVMEAEVYTSLEATFDRVKSIAYEKGDFDVYDLSVPEYGRNFIGGEGLLVLHNTVIQHQLAKWSDANIVVYIGCGERGNEMTEILTTFPELKDPVSGQPLMDRTVLIANTSNMPVAAREASIYTGITIAEYYRDMGYDVALMADSTSRWAEALREISGRLEEMPGEEGYPAYLGRRISEFYERSGRARLVSPEDRFGSITVIGAVSPPGGDISEPVSQNTLRVTRVFWALDASLANRRHFPSINWLNSYSLYTEDLRHWYDENVAKDWGSLRSQAMDILQRESELQEVAQLVGYDAMPEKEKSILDVARIIREDFLQQSAFDEIDSYCSLRKQYLMLKAIMELNSYQSMAIDHGVTMDNLSSLPVREKLSRMKIVPEDQVESYYSSIIKEIHKEYTSFIGEKNAEANI

SEQ ID NO: 1901 - protein, 438 aa, Methanocaldococcus jannaschii
MVNKMKWRRTHYSADIKPEMDGQEVIIMGWVHSIRALGKIIFVILRDREGTVQIVAPKQKVGDELFSQIKKLGAEDVIAVKGKVIANEKAPNGFEILPLELEVINTAKRPLPLDPAEKVPAELDTRLENRFLDLRRPKVQAIFKIRSEMLKSVRNTLYNEGFIEVNTPKLVASCTEGGTELFPISYFEREAFLGQSPQLYKQMLMATGLDRVFEIAPIFRAEEHNTRRHLNEATSIDIEMAFADDKDAMDILEKVVYNAFVDVYENRKKEIETLGIEFELPPEKFDRITYDEAIDIANAKGVEISWGEDLSREAEKAIGEEMEGLYFITDWPSEIRPFYTMPDEKNPNICKAFDLMYKDLEISSGAQRIHLYDLLVENIKKKGLNPDGFTYYLEAFKYGMPPHAGWGLGADRFTMVLTQQENIRECVLFPRDRQRLTP

SEQ ID NO: 1902 - protein, 500 aa, Streptococcus agalactiae
MNKRVKIVATLGPAVEFRGGKKFGESGYWGESLDVEASAEKIAQLIKEGANVFRFNFSHGDHAEQGARMATVRKAEEIAGQKVGFLLDTKGPEIRTELFEDGSDFHSYTTGTKLRVATKQGIKSTPEVIALNVAGGLDIFDDVEVGKQILVDDGKLGLTVFAKDKDTREFEVVVENDGLIGKQKGVNIPYTKIPFPALAERDNADIRFGLEQGLNFIAISFVRTAKDVNEVRAICEETGNGHVKLFAKIENQQGIDNIDEIIEAADGIMIARGDMGIEVPFEMVPVYQKMIITKVNAAGKAVITATNMLETMTDKPRATRSEVSDVFNAVIDGTDATMLSGESANGKYPVESVRTMATIDKNAQTLLNEYGRLDSSAFPRNNKTDVIASAVKDATHSMDIKLVVTITETGNTARAISKFRPDADILAVTFDEKVQRSLMINWGVIPVLADKPASTDDMFEVAERVALEAGLVESGDNIVIVAGVPVGTGGTNTMRVRTVK

SEQ ID NO: 1903 - protein, 408 aa, Streptococcus agalactiae
MAGNRNNDMNVYCSFCGKSQDEVKKIIAGNGVFICNECVALSQEIIKEELAEEVLADLAEVPKPKELLEILNQYVVGQDRAKRALAVAVYNHYKRVSYTESSDDDVDLQKSNILMIGPTGSGKTFLAQTLAKSLNVPFAIADATSLTEAGYVGEDVENILLKLIQAADYNVERAERGIIYVDEIDKIAKKGENVSITRDVSGEGVQQALLKIIEGTVASVPPQGGRKHPNQEMIQINTKNILFIVGGAFDGIEDLVKQRLGEKIIGFGQTSRKIDDNASYMQEIISEDIQKFGLIPEFIGRLPVVAALELLTAEDLVRILTEPRNALVKQYQTLLSYDGVELEFDQDALLAIADKAIERKTGARGLRSIIEETMLDIMFEIPSQEDVTKVRITKAAVEGTDKPVLETA

SEQ ID NO: 1904 - protein, 492 aa, Corynebacterium efficiens
MGAAGVPARFILDSVSMSLSTASPTIVWFRDDLRIRDNAALAWAADRGPVIGLFIDEDQPRALGGAARWWRDRSLTLLVDALATHGVPLLRRSGDPVVLLTEVVRETGAAAVTWNRRYHGPLRERDAEIKTQLREQGLEVHSHAGFLLTEPWEVTSGAGTGYKVYTPFSKAAFPLADESAARLGDPMPAQLTGPDTPVADTGGIDAPDPFWAAEMATHCRPGEQAALDRLGDFLDRMRERGGYADGRDEMARAVTSGLSPHLRFGEISVHRVWEEITAAADAGDIDATDAQVFRKELLWRDFAWHRLYALPDMATTNVREQFNRFGWAWDEHEAARLVDGRHPLSPTSSDEFHVALAAWRAGRTGIPLVDAGMRELWATGSMHNRSRMVVASFLTKNLQIHWRHGEEWFWETLVDADPASNAFNWQWAAGSGDDASPYFRIFNPETQARKFDPDETYIRRWIPEYGTPEYPAPIVDLKESRREALDAYEAVK

SEQ ID NO: 1905 - protein, 329 aa, Ananas comosus
MALSMSGIVAVLMVLSLAPLSLGGGYLCPEYYDKSCPQVKEIVWSMVAKAVAKEPRMAASLLRLHFHDCFVKGCDASILLDSSGSIVSEKGSKPNKNSARGFEVIDDIKAAVEQACPKTVSCADILALTARYSTVVAGGPNWEVPLGRRDSLGASLSGSNNDIPAPNNTLPTIITKFKRQGLDVVDVVALAGAHTIGFSRCTSFRQRLYNQSGNGLADSTLDESYAMQLRWGCPRSGSDDNLFPLDYVSPAQFDNYYYKNILVGKGLLNSDQILFTKSATTRQLVELYAANIGIFYDHFAKSMIKMGNITPLTGLEGEVRTNCRRINSS

SEQ ID NO: 1906 - protein, 617 aa, Cynara scolymus
MRTTEPQTDLEHAPNHTPLLDHPEPPPAAVRNRLLIRVSSSITLVSLFFVSAFLLILLYQHDSTYTDDNSAPSESSSQQPSAADRLRWERTAFHFQPAKNFIYDPNGPLFHMGWYHLFYQYNPYAPFWGNMTWGHAVSKDMINWFELPIALAPTEWYDIEGVLSGSTTILPDGRIFALYTGNTNDLEQLQCKAVPVNASDPLLVEWVRYDANPILYAPSGIGLTDYRDPSTVWTGPDGKHRMIIGTKRNTTGLVLVYHTTDFTNYVMLDEPLHSVPNTDMWECVDLYPVSTTNDSALDVAAYGPGIKHVLKESWEGHAMDFYSIGTYDAFNDKWTPDNPELDVGIGLRCDYGRFFASKSLYDPLKKRRVTWGYVAESDSYDQDVSRGWATIYNVARTIVLDRKTGTHLLQWPVEEIESLRSNGHEFKNITLEPGSIIPLDVGSATQLDIVATFEVDQEALKATSDTNDEYGCTTSSGAAQRGSFGPFGIAVLAHGTLSELTPVYFYIAKNTKGGVDTHFCTDKLRSSYDYDGEKVVYGSTVPVLDGEEFTMRILVDHSVVEGFAQGGRTVITSRVYPTKAIYEAAKLFVFNNATTTSVKATLKVWQMSQAFVKAYPF

SEQ ID NO: 1907 - protein, 1011 aa, Arabidopsis thaliana
MKLFLLLSFSAHLLLGADGFTDETDRQALLEFKSQVSEGKRDVLSSWNNSFPLCNWKWVTCGRKHKRVTHLNLGGLQLGGIVSPSIGNVSFLISLDLSDNAFGGIIPREVGNLFRLEHLYMAFNSLEGGIPATLSNCSRLLNLDLYSNPLRQGVPSELGSLTKLVILDLGRNNLKGKLPRSLGNLTSLKSLGFTDNNIEGEVPDELARLSQMVGLGLSMNKFFGVFPPAIYNLSALEDLFLFGSGFSGSLKPDFGNLLPNIRELNLGENDLVGAIPTTLSNISTLQKFGINKNMMTGGIYPNFGKVPSLQYLDLSENPLGSYTFGDLEFIDSLTNCTHLQLLSVGYTRLGGALPTSIANMSTELISLNLIGNHFFGSIPQDIGNLIGLQRLQLGKNMLTGPLPTSLGKLLRLGLLSLYSNRMSGEIPSFIGNLTQLEILYLSNNSFEGIVPPSLGKCSHMLDLRIGYNKLNGTIPKEIMQIPTLVNLSMEGNSLSGSLPNDIGSLQNLVKLSLENNKFSGHLPQTLGNCLAMEQLFLQGNSFDGAIPNIRGLMGVRRVDLSNNDLSGSIPEYFANFSKLEYLNLSINNFTGKVPSKGNFQNSTIVFVFGNKNLCGGIKDLKLKPCLAQEPPVETKHSSHLKKVAILVSIGIALLLLLVIASMVLCWFRKRRKNQQTNNLVPSKLEIFHEKISYGDLRNATNGFSSSNMVGSGSFGTVFKALLPTESKIVAVKVLNMQRRGAMKSFMAECESLKDTRHRNLVKLLTACASTDFQGNEFRALIYEYLPNGSVDMWLHPEEVEEIRRPPRTLTLLERLNIVIDVASVLDYLHVHCHEPIAHCDLKPSNVLLEDDLTAHVSDFGLARLLLKFDKESFLNQLSSAGVRGTIGYAAPEYGMGGQPSIHGDVYSFGVLLLEMFTGKRPTDELFGGNLTLHSYTKLALPEKVFEIADKAILHIGLRVGFRTAECLTLVLEVGLRCCEEYPTNRLATSEVAKELISIRERFFKTRRTPRR

SEQ ID NO: 1908 - protein, 526 aa, Aspergillus niger
MAASSSLDHLSNRMKLEWHSKLNTEMVPSKNFRRTSIIGTIGPKTNSVEKINSLRTAGLNVVRMNFSHGSYQYHQSVIDNAREAAKTQVGRPLAIALDTKGPEIRTGNTPDDKDIPIKQGHELNITTDEQYATASDDKNMYLDYKNITKVISPGKLIYVDDGILSFEVLEVVDDKTIRVRCLNNGNISSRKGVNLPGTDVDLPALSEKDIADLKFGVRNKVDMVFASFIRRGSDIRHIREVLGEEGKEIQIIAKIENQQGVNNFDEILEETDGVMVARGDLGIEIPAPKVFIAQKMMIAKCNIKGKPVICATQMLESMTYNPRPTRAEVSDVANAVLDGADCVMLSGETAKGNYPNEAVKMMSETCLLAEVAIPHFNVFDELRNLAPRPTDTVESIAMAAVSASLELNAGAIVVLTTSGKTARYLSKYRPVCPIVMVTRNPAASRYSHLYRGVWPFLFPEKKPDFNVKVWQEDVDRRLKWGINHALKLGIINKGDNIVCVQGWRGGMGHTNTVRVVPAEENLGLAE

SEQ ID NO: 1909 - protein, 623 aa, Vigna radiata
MPAVYGARLTTFEDSEKESEYGYVRKVSGPVVVADGMAGAAMYELVRVGRDNLIGEIIRLEGDSATIQVYEETAGLMVNDPVLRTHKPLSVELGPGILGNIFDGIQRPLKTIAKRSGDVYIPRGVSVPALDKDTLWEFQPKKIGEGDLLTGGDLYATVFENTLMQHHIALPPDAMGKITYIAPPGQYSITDTVLELEFQGVKKKFTMLQTWPVRTPRPVASKLAADTPLLTGQRVLDALFPSVLGGTCAIPGAFGCGKTVISQALSKYSNSDAVVYVGCGERGNEMAEVLMDFPQLTMTLPDGREESVMKRTTLVANTSNMPVAAREASIYTGITLAEYFRDMGYNVSMMADSTSRWAEALREISGRLAEMPADSGYPAYLAARLASFYERPGKVKCLGGPERTGSVTIVGAVSPPGGDFSDPVTSATLSIVQVFWGLDKKLAQRKHFPSVNWLISYSKYSTALESFYEQFDPDFINIRTKAREVLQREDDLNEIVQLVGKDALAEGDKITLETAKLLREDYLAQNAFTPYDKFCPFYKSVWMMRNIIHFYNLANQAVERGAGSDGQKITYSLIKHRVGDLFYRLVSQKFEDPAEGEAALVGQFQKLHEDLSTGFRNLEDETR

SEQ ID NO: 1910 - protein, 437 aa, Brassica rapa
TFSVLLVFVVMFLFHPALSIYINTLSSTESLTISSNRTLVSPGDVFEFGFFKTNSSSRWYLGLWYKKLPYRTYVWIANRDNPLSNSIGTLKISDMNLVLLDHSNKSVWSTNLTRGNERSPVVAELLPNGNFVIRYFNNNDASGFLWQSFDYPTDTLLPEMKLGYDLKKGLNRFLTSWRSSDDPSSGEFSYKLEPRRLPEFYIFIEDIPVHRSGPWNGIRFSGILEDQKLSYMVYNFTENSEEVAYAFRMTNNSIYSRLTLSSEGYFQRLTWTPSSVVWNLFWSSPANVECDLYRVCGPNGYCDMNTSPSCNCIQGFNPRNMQQWDLRDPSSGCIRRTLLSCGGDGFTRMMKVKLPDTTMAIVDRSIGLKECKKRCLGDCNCTAFANADTRNGGTGCVTWTGELEDIRNYIRDGQDLYVRLAAADLVKKRNANGKIVS

SEQ ID NO: 1911 - protein, 424 aa, Brassica rapa
TLSFLLVFFVLILLPPAFSINTLSSEESLTISSNRTLVSRGDVFELGFFKTTSSSRWYLGIWYKKFPYRTYVWVANRDNPLSNSIGTLKISGSNLVLLDNSNKSVWSTNVTRGNERSPVVAELLANGNFVMRDSNNNDASEFLWQSFDYPTDTLLPEMKLGYDLKTGLNRFLISWRSSDDPSSGDYSYKLEPRRLPEFYLLQGDVREHRSGPWNGIRFSGILEDQKLSYMEYNFTETSEEVAYTFRMTNNSFYSRLTLSSTGYFERLTWAPSSVVWNVFWSSPNHQCDMYKICGPYSYCDVTTSPVCNCIQGFRPKNRQQWDLRISLRGCIRRTRLSCSGDGFARMKYMKLPETTMAIVDRSIGVKECEKRCLSDCNCTAFANADVRNGGTGCVIWTGRLDDMRNYVPDHGQDLYVRLAAADLV

SEQ ID NO: 1912 - protein, 415 aa, Wigglesworthia brevipalpis
MIDNRKNVSNKFLCCSFCGKNQNEVKKLIAGMSVYICDECVILCNNIVQEEKKQLEFSLYENMYLPKPCEIFNYLNSYVIGQETAKKILSVSVYNHYKKLKNLKSNNKVELGKSNVLLIGPTGSGKTLLAETLARFLKVPFIISDATTLTEAGYVGEDVENVIQRLLNKCDFDIKKAQHGIIYIDEIDKISRKSDNPSITRDVSGEGVQQALLKLIEGTISAVPKKGGRKHPQQEFFHVDTTNILFICGGAFSGLNKIIEQRVLVKNSIGFNVDINNKLNINNKKNFLSQVQPEDLIKFGLIPEFVGRLPIISVLKELNISELIEILIQPKNALVKQYKLLFNLEGVELEFNENALISIAKESLHKKTGARGLRSIIEHILLDTMYSLPSKKNVQKIVINDGVILRKEKPLFIFN

SEQ ID NO: 1913 - protein, 645 aa, Wigglesworthia brevipalpis
MEILMGNIIGIDLGTTNSCVAIIENGKVKVIENSEGDRTTPSIIAYTEENEILVGQPAKRQSVTNPKNTFFAIKRLIGRKFTDHEVQRDVNIMPYKIVSSENGDVWLNVKNQKVAPPQISAEILKKMKKTAEDYIGKSITEAVITVPAYFNDTQRQATKDAGKIAGLDVKRIINEPTAAALAYGLDKKTGNRIIAVYDLGGGTFDISIIEIDDVDGEKTFEVLSTNGDTHLGGEDFDSRLINYLVNEFKKEQGIDLRNDPLAMQRLKESSEKAKIELSSVHQTDVNLPYITADSSGPKHMNIKVTRAKLESLVEELIYKTLEPVKTSLKDAKLKIIDIKDVILVGGQTRMPLVQKKVSDFFGKEPRKDVNPDEAVAIGAAVQGGVLAGDVKDVLLLDVTPLSLGIETMGGVMTTLISKNTTIPTKHSQIFSTAEDNQSAVTIHVLQGERKRSIDNKSLGQFNLDGIAPAMRGMPQIEVTFDIDADGILHVSAKDKNSGREQKITIKASSGLSENEIDKMLKESEANAELDIKFEELVKTKNQADHLLHSTRKQIKEAKNLPLEKKTEIEKCINELELSIKGEDKKDIEIKIQSLIQISSCLVDFSKNKENLNKEDIIKTNKKENNNKTNDDVVDAEFEEIKDKKN

SEQ ID NO: 1914 - protein, 328 aa, Wigglesworthia brevipalpis
MISLREFIFSNNVNKYISKEDLYSLFIIIELTSKIIHNYIILNNITRIKQEKIKKNIHGEHQTKLDLLSNKKFIDMIKTHYNIAGIASEEEAKFISFKQEKYGKYIFLIDPLDGSLSADCNTPVGTIFSLYCRVTPIGVEISEKDFLQPGNKQILSGYILYGSSTILVFTVKSGVHIFTYHPFFSTFFLSKKNFNYPKKNNIYSINEANYNNFSLGIKKYIMSCKSNNNISSRYTGSLVADFHRNLIKGGIYLYPNTKIYKHGKLRLMYECNPIALISSQANGSSSDGNINILDINPKILHQCSPFFVGTKSMVKLVNKFILGYYNHN

SEQ ID NO: 1915 - protein, 578 aa, Thermus thermophilus
MIQGVIQKIAGPAVIAKGMLGARMYDICKVGEEGLVGEIIRLDGDTAFVQVYEDTSGLKVGEPVVSTGLPLAVELGPGMLNGIYDGIQRPLERIREKTGIYITRGVVVHALDREKKWAWTPMVKPGDEVRGGMVLGTVPEFGFTHKILVPPDVRGRVKEVKPAGEYTVEEPVVVLEDGTELKMYHTWPVRRARPVQRKLDPNTPFLTGMRILDVLFPVAMGGTAAIPGPFGSGKTVTQQSLAKWSNADVVVYVGCGERGNEMTDVLVEFPELTDPKTGGPLMHRTVLIANTSNMPVAAREASIYVGVTIAEYFRDQGFSVALMADSTSRWAEALREISSRLEEMPAEEGYPPYLAARLAAFYERAGKVITLGGEEGAVTIVGAVSPPGGDMSEPVTQSTLRIVGAFWRLDASLAFRRHFPAINWNGSYSLFTSALDPWYRENVAEDYPELRDAISELLQREAGLQEIVQLVGPDALQDAERLVIEVGRIIREDFLQQNAYHEVDAYCSMKKAYGIMKMILAFYKEAEAAIKRGVSIDEILQLPVLERIGRARYVSEEEFPAYFEEAMKEIQGAFKALA

SEQ ID NO: 1916 - protein, 426 aa, Caulobacter crescentus
MRRVVVTGIGLLTPLGQGVDITWKNILAGKSGANRISAFDPTDYSCQVACEVPRVDGRGGGGPDVEGSFDPDQTMSPRDQKRVDDFILYGVAAADEAIKDSGWVPETDEDKWRTGVILGSGIGGLSTIADTALELEAKGPRRVSPFFISSALINLISGQVSIKYGFKGPNHAVVTACATGAHAIGDAARLIKYGDADVMVAGGAEAAVCKVGIAGFQACRAVATAFNDTPEKASRPYDKDRDGFVMGEGAGVLVLEEYEHAKARGAKIYAEVAGYGLSGDAYHITAPSEDGEGGARALAAAVRDAGLKPSDINYVNAHGTSTMADGIEAKAVERFLGDHAKNVVMSSTKSMTGHLLGAAGAIEAAFSILAIRDQIAPPTINLDNPDVEVAMNLAPHKAVPMKIDVAVSNSFGFGGTNASVVFKKVS

SEQ ID NO: 1917 - protein, 413 aa, Escherichia coli
MSKRRVVVTGLGMLSPVGNTVESTWKALLAGQSGISLIDHFDTSAYATKFAGLVKDFNCEDIISRKEQRKMDAFIQYGIVAGVQAMQDSGLEITEENATRIGAAIGSGIGGLGLIEENHTSLMNGGPRKISPFFVPSTIVNMVAGHLTIMYGLRGPSISIATACTSGVHNIGHAARIIAYGDADVMVAGGAEKASTPLGVGGFGAARALSTRNDNPQAASRPWDKERDGFVLGDGAGMLVLEEYEHAKKRGAKIYAELVGFGMSSDAYHMTSPPENGAGAALAMANALRDAGIEASQIGYVNAHGTSTPAGDKAEAQAVKTIFGEAASRVLVSSTKSMTGHLLGAAGAVESIYSILALRDQAVPPTINLDNPDEGCDLDFVPHEARQVSGMEYTLCNSFGFGGTNGSLIFKKI

SEQ ID NO: 1918 - protein, 413 aa, Listeria innocua
MDRRRVVVTGIGAVTPIGNDAETSWENAKKGVNGVAEMTRLNPDDFPVKIAAELKDFDVEKYLEKKEARKMDRFTHYAIASAEMAVQDSGLIIDDSNATRVGVWIGSGIGGMETFETQYEVFLNRGHRRVSPFFVPMMIPDMGSGQVSIRFGAKGINSTTVTACATATNSIGDAFKVIERGDADAMITGGAEAPITKMSLAGFTANKALSLNPDPETACRPFDKDRDGFIIGEGAGVVILEEYEHAKARGAKIYAEVVGYGATGDAYHITAPAPNGEGAARAMKMAIDDAGLTPDKVDYINAHGTSTPYNDEYETQAIKTVFGEHAKKLAISSTKSMTGHTLGASGGIEAIFALLSIRDNIIAPTIHLENQDEVCDLDYVPNKAREAEVNVVMSNSFGFGGHNATLVFKRIED

SEQ ID NO: 1919 - protein, 347 aa, Arabidopsis thaliana
MLIWFDVTTLHRQKKVKTEPSWRIFSLKELHAATNSFNYDNKLGEGRFGSVYWGQLWDGSQIAVKRLKAWSSREEIDFAVEVEILARIRHKNLLSVRGYCAEGQERLIVYDYMPNLSLVSHLHGQHSSESLLDWTRRMNIAVSSAQAIAYLHHFATPRIVHGDVRASNVLLDSEFEARVTDFGYDKLMPDDGANKSTKGNNIGYLSPECIESGKESDMGDVYSFGVLLLELVTGKRPTERVNLTTKRGITEWVLPLVYERKFGEIVDQRLNGKYVEEELKRIVLVGLMCAQRESEKRPTMSEVVEMLMIESKEKMAQLEANPLFNGNNDGEVIDESSEIISEVRDHQ

SEQ ID NO: 1920 - protein, 732 aa, Arabidopsis thaliana
MKVQEGLFVVAVFYLAYTQLVKGQPRKECQTRCGNVAVEYPFGTSPGCYYPGDESFNLTCNEQEKLFFGNMPVINMSLSGQLRVRLVRSRVCYDSQGKQTDYIARRTTLGNFTLSELNRFTVVGCNSYAFLRTSGVEKYSTGCISICDSATTKNGSCSGEGCCQIPVPRGYSFVRVKPHSFHNHPTVHLFNPCTYAFLVEDGMFDFHALEDLNNLRNVTTFPVVLDWSIGDKTCKQVEYRGVCGGNSTCFDSTGGTGYNCKCLEGFEGNPYLPNGCQDINECISSRHNCSEHSTCENTKGSFNCNCPSGYRKDSLNSCTRKVRPEYFRWTQIFLGTTIGFSVIMLGISCLQQKIKHRKNTELRQKFFEQNGGGMLIQRVSGAGPSNVDVKIFTEKGMKEATNGYHESRILGQGGQGTVYKGILPDNSIVAIKKARLGNRSQVEQFINEVLVLSQINHRNVVKVLGCCLETEVPLLVYEFINSGTLFDHLHGSLYDSSLTWEHRLRIATEVAGSLAYLHSSASIPIIHRDIKTANILLDKNLTAKAADFGASRLIPMDKEQLTTIVQGTLGYLDPEYYNTGLLNEKSDVYSFGVVLMELLSGQKALCFERPHCPKNLVSCFASATKNNRFHEIIDGQVMNEDNQREIQEAARIAAECTRLMGEERPRMKEVAAELEALRVKTTKYKWSDQYRETGEIEHLLGVQILSAQGETSSSIGYDSIRNVTTLDIEAGR

SEQ ID NO: 1921 - protein, 484 aa, Chlamydophila pneumoniae
MITRTKIICTIGPATNSPEMLAKLLDAGMNVARLNFSHGSHETHGQAIGFLKELREQKRVPLAIMLDTKGPEIRLGNIPQPISVSQGQKLRLVSSDIDGSAEGGVSLYPKGIFPFVPEGADVLIDDGYIHAVVVSSEADSLELEFMNSGLLKSHKSLSIRGVDVALPFMTEKDIADLKFGVEQNMDVNAASFVRYGEDIETMRKCLADLGNPKMPIIAKIENRLGVENFSKIAKLADGIMIARGDLGIELSVVEVPNLQKMMAKVSRETGHFCVTATQMLESMIRNVLPTRAEVSDIANAIYDGSSAVMLSGETASGAHPVAAVKIMRSVILETEKNLSHDSFLKLDDSNSALQVSPYLSAIGLAGIQIAERADAKALIVYTESGSSPMFLSKYRPKFPIIAVTPSTSVYYRLALEWGVYPMLTQESDRAVWRHQACIYGIEQGILSNYDRILVLSRGACMEETNNLTLTIVNDILTGSEFPET

SEQ ID NO: 1922 - protein, 464 aa, Arabidopsis thaliana
MSVARFDFSWCDADYHQETLENLKIAVKSTKKLCAVMLDTVGPELQVINKTEKAISLKADGLVTLTPSQDQEASSEVLPINFDGLAKAVKKGDTIFVGQYLFTGSETTSVEEVKGDDVICISRNAATLGGPLFTLHVSQVHIDMPTLTEKDKEVISTWGVQNKIDFLSLSYCRHAEDVRQARELLNSCGDLSQTQIFAKIENEEGLTHFDEILQEADGIILSRGNLGIDLPPEKAALYKCNMAGKPAVLTRVVDSMTDNLRPTRAEATDVANAVLDGSDAILLGAETLRGLYPVETISTVGRICCEAEKVFNQDLFFKKTVKYVGEPMTHLESIASSAVRAAIKVKASVIICFTSSGRAARLIAKYRPTMPVLSVVIPRLTTNQLKWSFSGAFEARQSLIVRGLFPMLADPRHPAESTSATNESVLKVALDHGKQAGVIKSHDRVVVCQKVGDASVVKIIELED

SEQ ID NO: 1923 - protein, 473 aa, Clostridium acetobutylicum
MQKTKMIFTVGPASETEEIVTAFIKAGMNASRHNFSHGDHAEHGGRIALVKKVRAKLNKPVAICLDTKGPEIRTGDFNPSKLELQKGSKFTIVCGEEIVGDATKCSISYKDLYKDVKPGNTILIDDGLVGLTVEAIEGTNVICTVANTGLVGSHKGVNVPNVSIQLPAMTEKDKSDLIFGCKEEIDMVSASFIRKPEDVLAIRKVLNENGGENIQIFSKIENQEGVDNIDAIIEVSDGIMVARGDMGVEIPIQRVPLIQKMIIKKCNAVGKPVITATQMLDSMMRNPRPTRAEASDIANAIFDGTDAIMLSGESANGSYPIEAVTTMAKIAQEAENEINYDKFLAERKGNEKKNTSDVISLGTCTAAADLEASAIITATQTGSTARTVSKYRPKAPVIAVTPSEKVARKLAMSWGVHPIISDKFGSTDELISTSVDKALEAGYVQKGDLVVVAAGVPTNVSGTTNMLKVQVVE

SEQ ID NO: 1924 - protein, 585 aa, Listeria monocytogenes
MKKTKIVCTIGPASESVDTLVQLIEAGMNVARLNFSHGDFEEHGARIVNIREASKKTGKQVAILLDTKGPEIRTNDMVGGKLEFQTGDVVRVSMTPVEGTKEKFSVTYGELYDDVEIGSSILLDDGLIGLEVIEKDEANRELVTKVLNPGVLKNKKGVNVPNVSINLPGITEKDAADIRFGLEQGIDFIAASFVRRATDVLEITKILEEHNATHVQIIPKIENQEGVDNIDEILQVSQGLMVARGDLGVEIPAEEVPIVQKELIRKCNKLGKPVITATQMLDSMQRNPRPTRAEASDVANAIFDGTDAIMLSGETAAGDYPVEAVKMMAKIAVRTEEVLVAQDKFALKLHENTDMTEAIGQAVGHTAKNLNVQTIVAATQSGHTARMISKYRPKSHIVAVTFNEHVYRGLALSWGVYPRLATPVSNTDEMFDLAVKESLASGVAKQGDLIIITAGVPVTESGTTNVMKIQLIGEKVVKGQGIGSKSVIGKAIVAKSNAEALEKAEEGGILIVKTTDKEILPAFEKSAAVVVEEGGLTSHAAVVGINLGIPVIVGAKDATSLVKDGEIITVDSRQGVVYNGKTATH

SEQ ID NO: 1925 - protein, 332 aa, Escherichia coli
MKTLGEFIVEKQHEFSHATGELTALLSAIKLGAKIIHRDINKAGLVDILGASGAENVQGEVQQKLDLFANEKLKAALKARDIVAGIASEEEDEIVVFEGCEHAKYVVLMDPLDGSSNIDVNVSVGTIFSIYRRVTPVGTPVTEEDFLQPGNKQVAAGYVVYGSSTMLVYSTGCGVHAFTYDPSLGVFCLCQERMRFPEKGKTYSINEGNYIKFPNGVKKYIKFCQEEDKSTNRPYTSRYIGSLVADFHRNLLKGGIYLYPSTASHPDGKLRLLYECNPMAFLAEQAGGKASDGKERILDIIPETLHQRRSFFVGNDHMVEDVERFICEFPDA

SEQ ID NO: 1926 - protein, 664 aa, Arabidopsis thaliana
MASSDALLPISAREEEPLCPYTRLPMADPNQETHGPRRRRPFKGLLAVSFGLLFIAFYVALIATHDGSRSNDEGIDETETITSRARLAGVSEKRNDGLWKLSGDRNTPAFEWNNSMLSWQRTAFHFQPEQNWMNDPNGPLFYKGWYHFFYQYNPNAAVWGDIVWGHAVSRDLIHWVHLPIAMVADQWYDSNGVWTGSATFLPDGSIVMLYTGSTDKAVQVQNLAYPEDPNDPLLLKWVKFPGNPVLVPPPGILPKDFRDPTTAWKTSEGKWRITIGSKLNKTGISLVYDTIDFKTYEKLDTLLHRVPNTGMWECVDFYPVSKTAGNGLDTSVNGPDVKHIVKASMDDTRFDHYAVGTYFDSNGTWIPDDPTIDVGMTASLRYDYGKFYASKSFYDQNKGRRVLWSWIGESDSEASDVQKGWSSLQGIPRTVVLDTKTGKNLVQWPVEEIKSLRLSSKQFDLEVGPGSVVPVDVGSAAQLDIEAEFEINKESLDKIIGNASVVAEAEEFSCEKSGGSTVRGALGPFGFSVLATESLSEQTPVYFYVAKGKDSELKTFFCTDTSRSSVANDVVKPIYGSVVPVLKGEKLTMRILVDHSIVEAFGQGGRTCITSRVYPTTAIYGAAKLFLFNNALDATVTASFTVWQMNSAFIHPYSDEAVRALSRT

SEQ ID NO: 1927 - protein, 556 aa, Halobacterium sp.
MNDVVYVGDEGLMGEVIEIEGDVTTIQVYEETSGIGPGQPVDNTGEPLTVDLGPGMLDSIYDGVQRPLDVLEDEMGAFLDRGVDAPGIDLDTDWEFEPTVEAGDEVAAGDVVGTVDETVSIEHKVLVPPRSDGGEVVAVESGTFTVDDTVVELDTGEEIQMHQEWPVRRQRPTVDKQTPTEPLVSGQRILDGLFPIAKGGTAAIPGPFGSGKTVTQQSLAKFADADIVVYIGCGERGNEMTEVIEDFPELPDPQTGNPLMARTTLIANTSNMPVAARESCIYTGITIAEYYRDMGYDVALMADSTSRWAEAMREISSRLEEMPGEEGYPAYLAARLSEFYERAGYFENFNGTEGSISVIGAVSPPGGDFSEPVTQNTLRIVKTFWALDSDLAERRHFPAINWDESYSLYKDQLDPWFTDNVVDDWAEQRQWAVDILDEESELEEIVQLVGKDALPEDQQLTLEVARYIREAWLQQNALHDVDRYCPPEKTYAILSGIKTLHEESFEALDAGVPVEEITSIDAAPRLNRLGTTPDDEHEAEVAEIKQQITEQLRELY

SEQ ID NO: 1928 - protein, 591 aa, Streptococcus pneumoniae
MTQGKIIKVSGPLVIASGMQEANIQDICRVGKLGLIGEIIEMRRDQASIQVYEETSGLGPGEPVVTTGEPLSVELGPGLISQMFDGIQRPLDRFKLATHNDFLVRGVEVPSLDRDIKWHFDSTIAIGQKVSTGDILGTVKETEVVNHKIMVPYGVSGEVVSIASGDFTIDEVVYEIKKLDGSFYKGTLMQKWPVRKARPVSKRLIPEEPLITGQRVIDAFFPVTKGGAAAVPGPFGAGKTVVQHQVAKFANVDIVIYVGCGERGNEMTDVLNEFPELIDPNTGQSIMQRTVLIANTSNMPVAAREASIYTGITMAEYFRDMGYSVAIMADSTSRWAEALREMSGRLEEMPGDEGYPAYLGSRIAEYYERAGRSQVLGLPEREGTITAIGAVSPPGGDISEPVTQNTLRIVKVFWGLDAPLAQRRHFPAINWLTSYSLYKDSVGTYIDGKEKTDWNSKITRAMNYLQRESSLEEIVRLVGIDSLSDNERLTMEIAKQIREDYLQQNAFDSVDTFTSFAKQEAMLSNILTFADQANHALELGSYFTEIMEGTVAVRDRMARSKYVSEDRLDEIKIISNEITHQIHLILETGGL

SEQ ID NO: 1929 - protein, 270 aa, Nostoc sp.
MPTISDHFQSLRQRQQCALIPFITAGDPDLQTTAEALRILDRHGADFIELGVPYSDPLADGPVIQAAATRALQRGTKLEQVLEMLETVIPSLQAPIILFTYYNPILHRGIQSFLETIAAVGVRGLVVPDLPLEEAEELIKTAANFGIEVILLVAPTSSQNRIEAIARQSQGFIYLVSVTGVTGIRSQIQDRVQHLITDLRHVTDKPIGVGFGISAPEQARQVKEWGADAVIVGSAFVKRLAEGSPSQGLQAVEKLCQELKTAITRVEARV

SEQ ID NO: 1930 - protein, 266 aa, Nostoc sp.
MTAISDRFETLKQNQECALIPFITAGDPDLETTAAALKILDSNGADFIELGIPYSDPLADGPVIQAAATRALQNGTKLERVLEMLKATIPSLRAPIILFTYYNPILHRGIDKFLEQIAAVGVAGLVVPDLPLEEAAGLLKPATERGIDLILLIAPTSSSERIEAIAHSSQGFIYLVSVTGVTGVRSQVEVRVSDLLRQIRQVTDKPIAVGFGISQPEQATQVKEWGADGAIVGSAFVQRLSAGTPAEGLSAIAEFCQSLKAAIKTS

SEQ ID NO: 1931 - protein, 656 aa, Ralstonia metallidurans
  misc_feature (622)..(622): Xaa can be any naturally occurring amino acid
MGKIIGIDLGTTNSCVSILEGNTPKVIENSEGARTTPSIIAYMEDGEILVGAPAKRQAVTNPRNTLYAVKRLIGRKFEEKEVQKDIGLMPYAIVKADNGDAWVGVRDQKLAPPQVSAEAVRKMKKTAEDYLGEPVTEAVITVPAYFNDAQCQATKDAGRIAGLDVKRIINEPTAAALAFGMDKNEKGDRKIAVYDLGGGTFDISIIEIADVDGEKQFEVLSTNGDTFLGGEDFDQRIIDYIIGEFKREQGVDLSKDVLALQRCKEAAEKAKIELSSSQQTEINLPYITADASGPKHLNLKITRAKLEALVEELITRTIEPCRTAIKDAGVKVSDIDDVILVGGMTRMPKVQEQVREFFGKEARKDVNPDEAVAVGAAIQGSVLSGDRTDVLLLDVTPLSLGIETLGGVMTKMINKNTTIPTKHAQVFSTADDNQPAVTIKVYQGEREMATGNKMLGEFNLEGIAPAPRGTPQIEVSFDIDANGILHVGAKDKATGKENRITIKANSGLSEDEIQRMVKDAEANAEEDKRARELADARNQADALIHSTRKALGRVRREARSWREGKDRSRDQGPGRRRPRVNKAEIDAKVNALSEASQKLGEKVYADMQAQAGEGAAAGAGAXRFSSRPSRRRQRVGCRVQGSERQEVIGDGGWRRG

SEQ ID NO: 1932 - protein, 365 aa, Arabidopsis thaliana
MGRSPCCDENGLKKGPWTPEEDQKLIDYIHKHGHGSWRALPKLADLNRCGKSCRLRWTNYLRPDIKRGKFSAEEEQTILHLHSILGNKWSAIATHLQGRTDNEIKNFWNTHLKKKLIQMGIDPVTHQPRTDLFASLPQLIALANLKDLIEQTSQFSSMQGEAAQLANLQYLQRMFNSSASLTNNNGNNFSPSSILDIDQHHAMNLLNSMVSWNKDQNPAFDPVLELEANDQNQDLFPLGFIIDQPTQPLQQQKYHLNNSPSELPSQGDPLLDHVPFSLQTPLNSEDHFIDNLVKHPTDHEHEHDDNPSSWVLPSLIDNNPKTVTSSLPHNNPADASSSSSYGGCEAASFYWPDICFDESLMNVIS

SEQ ID NO: 1933 - protein, 631 aa, Caulobacter crescentus
MSKIIGIDLGTTNSCVAIMDGKTPKVIENAEGARTTPSVVAFLEDGERLIGQPAKRQAVTNPTNTLFAIKRLIGRTASDPVVEKDKGMVPYEIVKGPTGDAWVKAHGKDYSPQEVSAFILQKMKEAAEAHLGEPVTKAVITVPAYFNDAQRQATKDAGKIAGLEVLRIINEPTAAALAYGLDKNDGKKIAVYDLGGGTFDVSILEIGDGVFEVKSTNGDTFLGGEDFDLRIVDYLADEFKKEQGVDLRKDKLALQRLREEAEKAKKELSSTAQYEVNLPFISMNASGPLHLNIKLSRAKLEALVDDLIARTIGPCEQALKDAGLKKSDIDEVILVGGMSRMPKVQQAVQDFFGREPHKGVNPDEVVALGAAVQAGVLQGDVKDVLLLDVTPLTLGIETLGGVFTPLIERNTTIPTKRSQTFSTADDNQSAVTIRVFQGERPMAQDNKMLGQFDLVGIPPAPRGVPQIEVTFDIDANGIVQVHAKDKATNKEHSIRIQANGGLSDSDIERMVKEAEANKAADEKKKQLVEAKNQGEAILHSTEKALAEHGDKVGAAEKTAIETGITELKTALEGEDVEAIQAKTQALIQASMKLGEAMYAAQQGSAEGGDAKADDGVVDAEFEEVDDNKPAA

SEQ ID NO: 1934 - protein, 627 aa, Rickettsia conorii
MGKVIGIDLGTTNSCVAVMEGKEPKVIENAEGERTTPSIIAFANGEKLVGQSAKRQAVTNPRNTIYAVKRLIGRNFIDPMVRKDQGIVPYNIVKADNGDAWVEADNNKYSPSQISAFILQKMKETAENYLGDKVTQAVITVPAYFNDAQRQATKDAGKIAGLEVLRIINEPTAAALAYGFEKSASKTIAVYDLGGGTFDVSILEIADGVFEVKSTNGDTFLGGEDFDTRILNHLIDVFKKENGIDLSKDPLALQRLKEAAEKAKKELSSAVTTDINLPYITADSSGPKHLNIKFTRAELEKLVDDLIEKTIEPCRKALQDAGFKASDIQEVVLVGGMTRMPKVQEAVKKFFGREPHKGVNPDEVVALGAAIQGGVLNKEVTDILLLDVTPLSLGIETLGGVFTRLIDRNTTIPTKKSQIFSTADDNQHAVTIRVFQGEREMAKDNKLLGQFNLEGIPLAPRGLPQIEVTFDIDANGIVHVSAKDKASGKEQKVTIQASGGLSDAEIEQMVKDAEQNADEDKKRKELIEAKNAADSLVYSTEKTLTEYGDKLSSDDKGAVEAALAALKAVLESEDTALIKEKTESLTAASMKIGEAMYKAQSESQPAAESATNDEKIVDADFQDVEKK

SEQ ID NO: 1935 - protein, 641 aa, Brucella melitensis
MERNMAKVIGIDMGTTNSCVAVMDGKNAKVIENAEGARTTPSIIAFTDGDERLAGQPAKRQAVTNPEGTLFAVKRLIGRRYDDPMVTKDKDLVPYKIVKGDNGDAWVEVHGKKYSPSQISAMILQKMKETAESYLGETVTQAVITVPAYFNDAQRQATKDAGKIAGLEVLRIINEPTAAALAYGLDKSEGKTIAVYDLGGGTFDVSVLEIGDGVFEVKSTNGDTFLGGEDFDIRLVEYLVAEFKKESGIDLKNDKLALQRLKEAAEKAKIELSSSQQTEINLPFITADQTGPKHLAIKLSRAKFESLVDDLVQRTVEPCKAALKDAGLKAGEIDEVVLVGGMTRMPKIQEVVKAFFGKEPHKGVNPDEVVAMGAAIQGGVLQGDVKDVLLLDVTPLSLGIETLGGVFTRLIERNTTIPTKKSQTFSTAEDNQSAVTIRVFQGEREMAADNKLLGQFDLVGIPPAPRGVPQIEVTFDIDANGIVNVSAKDKGTGKEHQIRIQASGGLSDADIEKMVKDAEANAEADKKRRESVEAKNQAESLVHSTEKSLAEYGDKVSADDKKAIEDAIAALKTSLEGEDAEDIKAKTQALAEVSMKLGQAMYEAAQAAEGAGAEGGEQASSSKDDVVDADYEEIDDNKKSS

SEQ ID NO: 1936 - protein, 414 aa, Guillardia theta
MKKIMDWLKSNITDLLVIYKNFNYELILNNKKISNNNLYLKFNCSLLKKKSYEINRYFPLNYNFENEKIINQFNNFKPKKVLLQLPQGLLEFLPALFSFLFSSSQELKKVFISKIITYGACNIDDEESKLLGICIIIHFGHSCLIKIKRCLVPVIYVFIEINFDDRFFCEKIIKNIGIKYTINIVETIQYRTKAFNLFKNLSFLNNDFKFSKISPLSQGEILGCTTHSGTFIKNFIYLGDGRFHPEGLVLSNPGSKIMQYNPITRQFINFDLKLSEIIFYREKEAYKILSNSKIMGFIKGSMGRQGASFIYRKIEFWIKKFYRGIVKFVFSVIDFFTISLLELSGIDIWVQNSCPRLSIDWGLFFVNPMLTVYEILNMTKIFYKNKKKYPMDFYSEVVNPWSNNYYNKYCRNKI

SEQ ID NO: 1937 - protein, 475 aa, Arabidopsis thaliana
MGGGFRVLHLVRPFLAFLPEVQSADRKIPFREKVIYTVISLFIFLVCSQLPLYGIHSTTGADPFYWMRVILASNRGTVMELGITPIVTSGLVMQLLAGSKIIEVDNNVREDRALLNGAQKLLWILSAIGEAVAYVLSGMYGPVGQLGVGNAILIILQLFFAGIIVICLDELLQKGYGLGSGISLFIATNICESIIWKAFSPTTINTGRGAEFEGAVIALFHMLITKSNKVAALRQAFYRQNLPNVTNLLATVLIFLIVIYFQGFRVVLPVRSKSARGQQGSYPIKLFYTSNMPIILQSALVSNLYFISQLLYRKFSGNFFVNLLGQWKESEYSGQSIPVSGLAYLITAPASFADMAAHPFHALFYIVFMLTACALFSKTWIEVSGSSARDVAKQLKEQQMVMPGHRESNLQKELNRYIPTAAAFGGVCIGALTVLADFMGAIGSGTGILLAVTIIYQYFETFEKEKASELGFFGF

SEQ ID NO: 1938 - protein, 125 aa, Arabidopsis thaliana
MASNTSFLFATIAILLVLNISGRTLPETEDSTNIAARLNGGGLMECWNALYELKSCTNEIVLFFLNGETKLGVDCCQAVEVITTDCWPAMLTSLGFTSDETNVLRGFCQSPNSGGSSPAPSSVKL

SEQ ID NO: 1939 - protein, 576 aa, Arabidopsis thaliana
MLEKVETFDMNRVIDEFDEMTRNAHQVQKQTLKEILLKNQSAIYLQNCGLNGNATDPEEAFKSMVPLVTDVELEPYIKRMVDGDTSPILTGHPVPAISLSSGTSQGRPKFIPFTDELMENTLQLFRTAFAFRNRYNFPIDDNGKALQFIFSSKQYISTGGVPVGTATTNVYRNPNFKAGMKSITSPSCSPDEVIFSPDVHQALYCHLLSGILFRDQVQYVFAVFAHGLVHAFRTFEQVWEEIVTDIKDGVLSNRITVPSVRTAMSKLLTPNPELAETIRTKCMSLSNWYGLIPALFPNAKYVYGIMTGSMEPYVPKLRHYAGDLPLVSHDYGSSEGWIAANVTPRLSPEEATFAVIPNLGYFEFLPVSETGEGEEKPVGLTQVKIGEEYEVVITNYAGLYRYRLGDVVKVIGFYNNTPQLKFICRRNLILSINIDKNTERDLQLSVESAAKRLSEEKIEVIDFSSYIDVSTDPGHYAIFWEISGETNEDVLQDCCNCLDRAFIDAGYVSSRKCKTIGALELRVVAKGTFRKIQEHFLGLGSSAGQFKMPRCVKPSNAKVLQILCENVVSSYFSTAF

SEQ ID NO: 1940 - protein, 804 aa, Nostoc sp.
MTNQFSPQIPSSTWNRPIGLGWDKPYTVRYASNIDDGPWHGMPLGGFGAGCIGRSSRGDFNLWHIDGGEHIFQNFPACQFSVFEANGTSSQAYALSTQPTDDESLKSWQWYPASSETQTTGTYHALYPRSWFVYENVFQAELTCEQFSPIWANNYQETSYPVAVFAWQAHNPTNAPITLSIMLTWQNMVGWFTNALKSPDVRVRDDGSPVYEYQPRLGESGGNYNYLDESPQHLGCFLGRVGMTEPLQEGEGSWCIATLKHSQVEVFYHTRWNPVGTGEEVWQSFAADGSLANHIDTSSVTENEQLGAAIAVRFTLQPGETLEIPFVVSWDLPVTEFAAGVNYYRRYTDFFGKTGDHAWAIATTALEQYKTWQQQIESWQDPILNRPDLPDWFKMALFNELYDLTSGGTLWSAATPCDPIGQFAVLECLDYRWYESLDVRLYGSFGLLQLFPELEKAVMRAFARAIPQGDDTPRVIGYYYTIGAESPIAVRKTPGATPHDLGAPNEHVWEKTNYTSYQDCNLWKDLGCDFVLQVYRDFLLTGADDVQFLRDCWDAIVETLDYVKTFDLDGDGIPENSGAPDQTFDDWRLQGVSAYCGGLWLAALAAAIAISDILLQNHQDSATKEHLLYQKSTYETWLTKSLPIYQEKLWNGKYYRLDSESGSDVVMADQLCGQFYANLLELPDIVPSDRAISALQTVYDACFLKFYDGQFGAANGVRPDGSPENPKATHPLEVWTGINFGLAAFLVQMGMKDEGFRLTQAVVEQIYNNGLQFRTPEAITAAGTFRASTYLRPMAIWAIYLMIG

SEQ ID NO: 1941 - protein, 231 aa, Arabidopsis thaliana
MDQMLSGEQDLEVDIEAGRSDVTQESTSDTVSGNGVWSERANFGVSEKIADDLSYPLIRDENRVETSSQSLDLSEKKCGNGKFKKSRKASKPPRPPKGPSLSENDRKIMRDIQELAMRKRARIERMKKSLKRLKAAKTSPSSPCITIFSMIITAIFFAFLVFQGFSTGSSSMNSDKSPAPTVSPNNQMISVQFYNDFAPVEQTDPSPTTSLRYTRKRISGAEEEDSRDVTR

SEQ ID NO: 1942 - protein, 803 aa, Sulfolobus solfataricus
MKYKYSYVLDSGVPLGGIGTGSMEIRADGRLYSWTIFNNGGIAERNEDRYRYFLTEFDSFFAYEEQKTVRILQAYDYYFGANPYTRPWIRPIREIEFIGEPPMAYLNYDNKVKLKAFSPLIPLDVRNSSLPVAIFKFNSEKNTRFFFGVNNPFEKGQIEIKEDMVIFKGETTSDDPRYQGNLCIKVIGEDVSAIAYNQIFDFWDDYRSNSLVKKKGDNLGIVSGKGNDLTFIITWFFPNFVLKDGRKVGHYYENFFNSCEEVMDYVVNNLNYLEEKTTQFHDLFYNAEGIESWIVDLIGAQIATLVKSTWLTKDGFFGIWEGYFDTSDYRKVGKYPYTGGPENTALNTIDVLLYALPGVMLLFPELAKNIVRDLSNRALKEDTPEYVLFSLAFPENLMKYKEEVKKDPTISTDLKKLYDTIKKIIKETGKDPKGRMPHYIRHSLTVDTYERVDINPEFVLLYYLIAKYTGDREFLTSVYEVARNAIESIMRTQTLDGLPYLTLPSGIEWMRHVNNMLKVSDAHKILGYHTLALSMQTLDDWSWLGFSPYVSFLWIAALEALNEASKLLNNLHNYEVKELTEKVNKYLWNGEYYINWYDPISNLRDDSLNASQMTGDWYVQLLGLPEFLDHEKRKSIFSSIIKYNYTEEEGVKNGSSNKEITPLGVKLSVQSKTPWSGIEYYLASHMFYNGFDEYAKKILRNVYERYELAGNFWNHLKWGARYMRPLVAINIVHAIEGIRVNLLNNDVNIDKRKNLKWILLLPTAWGLLTINNGKIRMRIYHGKFKGKINGIDVALRENEEIEF

SEQ ID NO: 1943 - protein, 872 aa, Arabidopsis thaliana
MNFSTFFFVDPYDFFIEFFFFKTFHRAVIERETKNMIKEIYCTDGRVVQGDDIMVEAEKFFKEFLQLIPEDFVGVEVRELQDLLQFRCTNSDNEMLTREVSSEEIKTVLFSMPKDKSPGPDGYTSEFYKATWDIIGQEFTLPVQSFFQKGFLPKGINSIILALIPKKLAAKEMRDYRPISCCNVLYKVISKIIANRLKLLLPRFIAENQSAFVKDRLLIENLLLATELVKDYHKDSISARCAIKIDISKAFDSVQWSFLTNTLVAMNFSPTFIHWINLCITTASFSVQVNGDLVGYFQSKRGLRQGCSLSPYLFVICMDVLSKMLDKAAGVRKFGFHPKCQRLGLTHLSFADDLMVLSDGKTRSIEGILEVFDEFCKRSGLRISLEKSTLYMAGVSPIIKQEIAAKFLFDVGQLPVRYLGLPLVTKRLTSADYSPLLEQIKKRIATWTFRFFSFAGRFNLIKSVLWSICNFWLAAFRLPRQCIREIDKLCSSFLWSGSEMSSHKAKISWDIVCKPKAEGGLGLRNLKEANDVSCLKLVWRIISNSNSLWTKWVAEYLIRKKSIWSLKQSTSMGSWIWRKILKIRDVAKSFSRVEVGNGESASFWYDHWSAHGRLIDTVGDKGTIDLGIPREASVADAWTRRSRRRHRTSLLNEIEEMMAYQRIHHSDAEDTVLWRGKNDVFKPHFSTRDTWHLIKATSSTVSWHKGVWFRHATPKYALCTWLAIHNRLPTGDRMLKWNSSGSVSGNCVLCTNNSKTLEHLFFSCSYASTVWAALAKGIWKTRYSTRWSHLLTHISTHFQDRVEGFLTRYIFQATIYHVWRERNGRRHDAAPNTPATVIGWIDKQTRNQITIIRQSGDRRYDKAFQAWLRARY

SEQ ID NO: 1944 - protein, 858 aa, Arabidopsis thaliana
MLKCRTFGINALSGPIPKEIGLLTDLRLLYIDSSGLSGGIPLSFANFVELEVAWIMDVELTGRIPDFIGFWTKLTTLRILGTGLSGPIPSSFSNLIALTELRLGDISNGSSSLDFIKDMKSLSVLVLRNNNLTGTIPSTIGGYTSLQQVDLSFNKLHGPIPASLFNLSRLTHLFLGNNTLNGSLPTLKGQSLSNLDVSYNDLSGSLPSWVSLPDLKLNLVANNFTLEGLDNRVLSGLHCLQKNFPCNRGEGIYYNFSINCGGPEIRSVSGALFEKEDADLGPASFVVSAAKRWAASSVGNFAGSSNNIYIATSLAQFINTMDSELFQSARLSASSLRYYGLGLENGGYTVTLQFAEVQIEGSNSWKGIGRRRFNIYVQGRLVEKDFDIRRTAGGSSVRAVQREYKTNVSENHLEVHLFWAGKGTCCIPIQGAYGPLIAAVSATPDFTPTVANRPPSKGKSRTGTIVGVIVGVGLLSIFAGVVILVIRKRRKPYTDDEEILSMDVKPYTFTYSELKNATQDFDLSNKLGEGGFGAVYKGNLNDGREVAVKQLSIGSRQGKGQFVAEIIAISSVLHRNLVKLYGCCFEGDHRLLVYEYLPNGSLDQALFGDKSLHLDWSTRYEICLGVARGLVYLHEEASVRIIHRDVKASNILLDSELVPKVSDFGLAKLYDDKKTHISTRVAGTIGYLAPEYAMRGHLTEKTDVYAFGVVALELVSGRKNSDENLEEGKKYLLEWAWNLHEKNRDVELIDDELSEYNMEEVKRMIGIALLCTQSSYALRPPMSRVVAMLSGDAEVNDATSKPGYLTDCTFDDTTSSSFSNFQTKDTSFSTSFIAPGPEMPLRDGESKPMVGFKIKEGR

SEQ ID NO: 1945 - protein, 1029 aa, Arabidopsis thaliana
MNCIHKFQNNKILTARALNSIFAAWKIQAPREWNISGELCSGAAIDASVLDSNPAYNPLIKCDCSFQNSTICRITNIKVYAIDVVGPIPPELWTLTYLTNLNLGQNVLTGSLPPAIGNLTRMQWMYVSDNFFVLLLTFGINALSGPVPKEIGLLTDLRLLGISSNNFSGSIPDEIGRCTKLQQMYIDSSGLSGRIPLSFANLVQLEQAWIADLEVTDQIPDFIGDWTKLTTLRIIGTGLSGPIPSSFSNLTSLTELYVLHWYQNHDYLLRLGDISSGSSSLDFIKDMKSLSVLVLRNNNLTGTIPSTIGEHSSLRQVDLSFNKLHGPIPASLFNLSQLTHLFLGNNTLNGSFPTQKTQSLRNVDVSYNDLSGSLPSWVSLPSLKLNLVANNFTLEGLDNRVLPGLNCLQKNFPCNRGKGIYSDFSINCGGPEKRSVTGALFEREDEDFGPASFFVSAGQRWAASSVGLFAGSSNNIYIATSQSQFVNTLDSELFQSARLSASSVRYYGLGLENGGYTVTLQFAEIQILGSTSTTWKGLGRRRFDIYVQGRLVEKDFDVRRTAGDSTVRAVQRVYKANVSENHLEVHLFWAGKGTCCIPIQGAYGPLISAVSATPDFTPTVANKPPSKGKNRTGTIVGVIVGVGLLSILAGVVMFTIRKRRKRYTDDEELLGMDVKPYIFTYSELKSATQDFDPSNKLGEGGFGPVYKGNLNDGRVVAVKLLSVGSRQGKGQFVAEIVAISSVLHRNLVKLYGCCFEGEHRMLVYEYLPNGSLDQALFGDKTLHLDWSTRYEICLGVARGLVYLHEEASVRIVHRDVKASNILLDSRLVPQISDFGLAKLYDDKKTHISTRVAGTIGYLAPEYAMRGHLTEKTDVYAFGVVALELVSGRPNSDENLEEEKKYLLEWAWNLHEKSRDIELIDDKLTDFNMEEAKRMIGIALLCTQTSHALRPPMSRVVAMLSGDVEIGDVTSKPGYVSDWRFDDTTGSSLSGFQIKDTTGYSMSLVAPGSEISPRDSDFKPMLGSKINEGR

SEQ ID NO: 1946 - protein, 867 aa, Arabidopsis thaliana
MNPFSSGTRLSDMIRAIRASKTAAEERAVVRKECAAIRASINENDQDYRHRDLAKLMFIHMLGYPTHFGQMECLKLIASPGFPEKRIGYLGLMLLLDERQEVLMLVTNSLKQDLNHTNQYIVGLALCALGNICSAEMARDLAPEVERLLQFRDPNIRKKAALCAIRIIRKVPDLSENFINPGAALLKEKHHGVLITGVHLCTEICKVSSEALEYFRKKCTEGLVKTLRDIANSPYSPEYDVAGITDPFLHIRLLKLLRVLGQGDADASDCMNDILAQVASKTESNKNAGNAILYECVQTIMSIEENGGLRVLAINILGKFLSNRDNNIRYVALNMLMRSLTVDSQAVQRHRATILECVKDSDASIQKRALELIYLLVNENNVKPLAKELIEYLEVSEQDFKGDLTAKICSIVEKFAPEKIWYIDQMLKVLSEAGTYVKEDVWHALIVVITNAPDLHGYTVRALYRALHTSFEQVDISLETLVRVAIWCIGEYADLLVNNAGMLDLEDPITVTESDAVDVVENAIKHHLSDVTTKAMALIALLKISSRFPSCSERVKSIIGQNKGSFVLELQQRSLEFSSVIQKHQNIRSSLVERMPVLDEATFSGRRAGSLPASVSTSGKSPLGIPNGVAKAAAPLVDLLDLGSDDTPAPTSSSNNFLQDLLGVDLSQPSAQPGAMQPSQAGADILMDLLSIGTPAPVQNGSANGDLLSIQDNNAPIAPSLTSPTAPSSMMDLLDGFGPTPPKSEDKSAAYPSIVAFESSSLKIEFNFTKQSENPQTTDIVANFINLTPNVYTEFLFQAAVPKFLQLHLDPASSNSLPANGNIKQTMRVTNSQKGKKPIVMRMRVGYKINGKDVLEEGQINNFPRGL

SEQ ID NO: 1947 - protein, 418 aa, Arabidopsis thaliana
MPHPTQVVALLKAQEIRHIRLYNADPGLLIALANTGIKVIISIPNDQLLGIGQSNSTAANWVKRNVIAHYPATMITAVSVGSEVLTSLSNAAPVLVSAIKNVHAALLSANLDKLIKVSTPLSTSLILDPFPPSQAFFNRSLNAVIVPLLSFLQSTNSYLMVNVYPYIDYMQSNGVIPLDYALFKPIPPNKEAVDANTLVRYSNAFDAMVDATYFAMAFLNFTNIPVLVTESGWPSKGETNEPDATLDNANTYNSNLIRHVLNKTGTPKRPGIAVSTYIYELYNEDTKAGLSEKNWGLFNANGEPVYVLRLTNSGSVLANDTTNQTYCTAREGADTKMLQAALDWACGPGKIDCSPIKQGETCYEPDNVVAHANYAFDTYYHQTGNNPDACNFNGVASITTTDPSKKHKKPFLIIHCIV

SEQ ID NO: 1948 - protein, 668 aa, Arabidopsis thaliana
MLSVKRCIKILKLWHLLPEITPSLRQNISGYNIFDWKGRVRSRSKKRSSSTPPRLITSQNCVKGKNIEIVPSTVLVEAGQSYAKGSAWVKKSTTGVARSPVKPPESHLPESVLVSAIPSEDSFPYPPGWGAMSSKSRKRWRHKWNISRSSAADHISKILVGDFDQIAATSDHYSVLQTSIPMRGLEEFQNCLRDSDLVDIPSRGVHYTWSNHQDDNPIIRKLDRAIANGDWFSSFPSAIAVFELSGVSDHSPCIIILENLPKRSKKCFRYFSFLSTHPTFLVSLTVAWEEQIPVGSHMFSLGEHLKAAKKCCKLLNRQGFGNIQHKTKEALDSLESIQSQLLTNPSDSLFRVEHVARKKWNFFAAALESFYRQKSRIKWLQDGDANTRFFHKVILANQAKNLIKFLRMDDDVRVENVTQVKEMIVAYYTHLLGSDSDILTPDSVQRIKDIHPFRCNDTLASRLSALPSDKEITAAVFAMPRNKAPGPDSFTAEFFWESWFVVKDSTIAAVKEFFRTGHLLKRFNATAITLIPKVTGVDQLSMFRPVSCCTVVLLDSTWRFLAQGMDRLEFGGPKEGFEVYSAYVLGWRPSGAHVKNKEPTRPRHSAGGRVVHLRMKRSHSTKLLGLGPSCMTKTKPLGFSTRPRAERSCADLSILSYSQLGQPRIAYK

SEQ ID NO: 1949 - protein, 887 aa, Arabidopsis thaliana
MAKSSADDEELRRACEAAIEGTKQSIVMSIRVAKSRGVWGKSGKLGRQMAKPRVLALSVKSKGPRKKAFLRVMKYSSGGVLEPAKMYKLKHLSKVEVITNDPSGCTFTLGFDNLRSQSVAPPQWTMRNTDDRNRLLVCILNICKDVLGRLPKVVGIDIVEMALWAKDNTPVVTTQRSTEDGEPVAESVTESDLKVTVEKELVSQAEEEDMEALLGTYVMGIGEAEAFSERLKRELQALEAANVHAILESEPLVDEVLNGLEAATNIVDDMDEWLGIFNIKLRHMREDIESIETRNNKLEMQSVNNKALIEELDKVIERLRVPSEYAASLTGGSFDEADMLQNIEACEWLAKALRGLEVPNLDPIYANMRAVKEKRAELEKLKATFVRRASEFLRNYFASLVDFMVSDKSYFSQRGQLKRPDHADLRYKCRTYARLLQHLKGLDKNCLGPLRKAYCSSLNLLLRREAREFANELRASTKVSRNPTVWLEGSTGSSQNANTDTSAVSDAYAKMLTIFIPLLVDESSFFAHFMCFEVPALAPPGGAGNDKKSQSNNDDGNDDDDLGIMDIDETDKKPGKNSPDLTALNESLQDLLDGIQEDFYAVVDWAYKIDPLRCISMHGITERYLSGQKADAAGFVRLLLGDLESRVSMQFSRFVDEACHQIERNERNVRQMGVLPYIPRFAALATRMEQYIQGQSRDLVDQAYTKFVSIMFVTLEKIAQQDPKYADILLLENYAAFQNSLYDLANVVPTLAKFYHQASEAYEQACTRHISMIIYYQFERLFQFAKKIEDFMYTITPEEIPFQLGLSKVELRKMLKSSLSGVDKSIAAMYKKLQKNLASEELLPSLWDKCKKEFLDKYESFVQLVAKVYPSENVPGVTEMRGLLASM

SEQ ID NO: 1950 - protein, 887 aa, Arabidopsis thaliana
MAKSSADDEELRRACEAAIEGTKQSIVMSIRVAKSRGVWGKSGKLGRQMAKPRVLALSVKSKGPRKKAILRVMKYSSGGVLEPAKMYDLKHLSKVEVITSDPSGCTFTLGFDNLRSQSVAPPQWTMRNTDDRNRLLVCILNICKDVLGRLPKVVGIDIVEMALWAKDNTPVVTTQRSTEDGEPVAESVTESALKVTVEKELVSQAEEEDMEALLGTYVIGIGEAEAFSERLKRELQALEAANVHAILESEPLVDEVLNGLEAATNIVDDMDEWLGIFNIKLRHMREDIESIEIRNNKLEMQSVNNKALIEELDKVIERLRVPSEYAASLTGGSFDEADMLQNIEACEWLAKALRGLEVPNLDPIYANMRAVKEKRAELEKLKATFVRRASEFLRDYFASLVDFKFSDKSYFSQRGQLKRPDHADLRYKCRTYARLMQHLKGLNKNCLGPLRKAYCSSLNLLLRREAREFAKELRASTKVSRNPTVWLEGSTGSSQNANTDTSAVSDAYAKMLTIFIPLLVDESSFFAHFMCFEVPALAPPGGAGNDKKSQSNNDDGNDNDDLGIMDIDEADKKPGKNSPDLTALNESLQDLLDGIQEDFYAVVDWAYKIDPLRSISMHGITERYLSGQKADAAGFVRLLLGDLESRISMQFSHFVDEACHQIEKNERNVRQMGVLPYIPRFAALATRMEQYIQGQSRNLVDQAYTKFVSILFVTLEKIAQQDPKYADILLLENYAAFQTCLFDLANVVPTLAKFYDQAMEAYEQACTRHISMIIYYQFERLFLFDKKIKDLMYTITPEEIPFQLGLSKVELRKMLKSSLSGVDKSIAAMYKKLQKNLASEELLPSLWDKCKKEFLDKYESFVQLVAKVYPSENVPGVTEMRGLLASM

SEQ ID NO: 1951 - protein, 1035 aa, Arabidopsis thaliana
MVRHSRRESFFDMVGFEVCPDTDLLWPFGKLDGLDRDEIRETAYEIFFAACRSSPGFGGRNALTFYSKHNAGDHQGDGIGGGGGSGSSNGSGFGSLGRKEVLTTPTSRVKRALGLKMLKRSPSRRMSTVGTVVGAVSAPSSPGNNGSIGSGSGHFSPGAGFFTVPPARPRRPLTSAEIMRQQMKVTEQSDTRLRKTLMRTLVGQTGRRAETIILPLELLRHVKPSEFGDVHEYQIWQRRQLKVLEAGLLIHPSIPLEKTNNFAMRLREIIRQSETKAIDTSKNSDIMPTLCNLVASLSWRNATPTTDICHWADGYPLNIHLYVALLQSIFDIRDETLVLDEIDELLELMKKTWIMLGITRAIHNLCFTWVLFHQYIVTSQMEPDLLGASHAMLAEVANDAKKSDREALYVKLLTSTLASMQGWTEKRLLSYHDYFQRGNVGLIENLLPLALSSSKILGEDVTISQMNGLEKGDVKLVDSSGDRVDYYIRASIKNAFSKVIENMKAEIEETEEGEEEAATMLLRLAKETEDLALRESECFSPILKRWHLVAAGVASVSLHQCYGSILMQYLAGRSTITKETVEVLQTAGKLEKVLVQMVAENSDECEDGGKGLVREMVPYEVDSIILRLLRQWIEEKLQTVQECLSRAKEAETWNPKSKSEPYAQSAGELMKLANDAIEEFFEIPIGITEDLVHDLAEGLEKLFQEYTTFVASCGSKQSYIPTLPPLTRCNRDSKFVKLWKKATPCAASGEELNQMGEAPGGNHPRPSTSRGTQRLYIRLNTLHFLSSQLHSLNKSLSLNPRVLPATRKRCRERTKSSSYFEFTQAGIESACQHVSEVAAYRLIFLDSYSVFYESLYPGDVANGRIKPALRILKQNLTLMTAILADKAQALAMKEVMKASFEVVLTVLLAGGHSRVFCRTDHDLIEEDFESLKKVYCTCGEGLIPEEVVDREAETVEGVIQLMGQPTEQLMEDFSIVTCESSGMGLVGTGQKLPMPPTTGRWNRSDPNTILRVLCYRDDRVANQFLKKSFQLGKRR

SEQ ID NO: 1952 - protein, 470 aa, Arabidopsis thaliana
MITVDHKSDTVLLPIYGRMVPFNVTTIRTVLGNQNTIRVIFNVPGTPLNPNDSLKNKDAIYLKEVSFRTKDSRHSSDVVQQVKSLRRKVMARESERAERTSLVNQEKLQIVRNNSKPLSLSNLWIRPPFSGRKKNRGTLEAHVNGFRYSTTNERVDVLFANIKHAFFQPAEKEMTTLLHFHLHNHIMVGTKKTKDVQFYVEVMDVVQSLGGRRRSSAYDADEIVEEQRERDRKNKINMDFNHFANQVNDMWQLPQFASLSLEFDQPLREFGFNGVPHKTSTFIIPTSSCLVELTESPFLVVCLSEIEIVNLERVGFGQKSFDMAIIFKDLKKDVLRVDSVPTNAGGWEFLNQDGSDSESGGSEDSDKGYEPSDVEVESESEDETSESESDDEEEEEDSEQESEEEKGKTWAELEREATNADREHGVESDSEEERKRRKMKAFGKSRPGSSGAGGSSSMKNMPPSKRSRHR

SEQ ID NO: 1953 - protein, 439 aa, Arabidopsis thaliana
MAALLLLFLFLFASSALSQDSLIGVNIGTEVTNMPSPTQVVALLKSQNINRVRLYDADRSMLLAFAHTGVQVIISVPNDQLLGISQSNATAANWVTRNVAAYYPATNITTIAVGSEVLTSLTNAASVLVSALKYIQAALVTANLDRQIKVSTPHSSTIILDSFPPSQAFFNKTWDPVIVPLLKFLQSTGSPLLLNVYPYFDYVQSNGVIPLDYALFQPLQANKEAVDANTLLHYTNVFDAIVDAAYFAMSYLNFTNIPIVVTESGWPSKGGPSEHDATVENANTYNSNLIQHVINKTGTPKHPGTAVTTYIYELYNEDTRPGPVSEKNWGLFYTNGTPVYTLRLAGAGAILANDTTNQTFCIAKEKVDRKMLQAALDWACGPGKVDCSALMQGESCYEPDDVVAHSTYAFNAYYQKMGKASGSCDFKGVATVTTTDPSM

SEQ ID NO: 1954 - protein, 1604 aa, Arabidopsis thaliana
MAPRSSKGKSNNKGKGGDKKKRDDKLLAPSLVEITVTTPYETQVILKGVSTDKIIDVRRLLASHVETCHFTNYSLSHKVKGHKLNDNIQVLSLKPCFLRMIPEEYLEESQALTQVRRVIDIVACTTRFFSKSPNKSIVAGNANPTPAPDGLDMVAIHTTPKLSQFYEFFSIHHLSPPILHLKKVDGEEAGEKRDGDYFGLKVKICNGKVIHVIASVKGFFAVGKQLSHCHSIVDLLQNVSNAFAKFGNLPFGLRSNTWLVPSPVSESASPLPTEDEHWGGNGGGQGRNGEYDHRPWAAEFSVLATLPCKTEEERVIRDKKAFLLHSQFIDTSVQRAVRAICNVMDTNQQTSGTTDLPAGSILLEDHVGDLSIVVKRDIASLDSKPEATFQNDAFVLSSEELAERNLLKGITADESVIVHTITSEEKNIQDTPALGKVIVRQCGYTAVVNVKGQTQKAMSDFRDILIDDLPDGGANALNLNSLRVEFHRPHSVGTSVENQPTQLDWDDLESYRCIIQELVKINLTKLEETRVSSVRPIRWELGSTWVQHLQKKETDVCGKPATNDETELSVKGLGKQFKDLKSKSKKSENISAVNEKDTRLHELNEEDDLGQKSIDGLFTELKELLSEEAFSRLKETGTGLHLKSKEELTNMAYGYYDEIALPRLVADFGSLELSPVDGRTLTDFMHIRGLQMRSLGHVAKLAEKLPHIQSLCIHEMITRAFKHLLRAVIASVNNMAELPVAVAASLNFMLGRRELEGCDRIPGEEYCLRLQWLQKFLSRKFGWIQKDEFHHLKKFSILRGLCQKVGLELVSRDFDFDSPNPFMSSDIIGLVPVCKHVLCISSDGRTLLESSKLALDKGKLDDAVSYGTKALVKMIAVCGPYHRNTACAYSLLAVVLYHTGDFNQATIYQQKALDINERELGLDHPDTMKSYGDLSVFYYRLQHFELALKYVNRALFLLHFTCGLSHPNTAATYINVAMMEKEVGNDHLALRYLHEALKSNKRLLGADHIQTAASYHAIAVALSFMEAHSLSVQHEQTTLQILTAKLGADDLRTQDAAAWLEYFESRAIEQQEAGRNGIPKPDASIASKGHLSVSDLLDYISSDPDTKGNVAHRKHRRARILQVNDKVASADDDAHRVASQIDIVTWNNVAEADVTKSRSEVNDPDTVVDKTNIETGDIVVHRLNVDRQTVEESTLDEGWQEAYSKGRSGNGAGRKSRQRQPDLMKKRMLLNKHHNRNQDVQQQNIYSPLQKTSKGPSLSKSSPRRALKNAEIDVSTNTTKPQLKASGAAAVTSTTLASKSLSYKEVALAPPGTVLKPMLEKLELNLERTETQIYRTSSASSGEESKSDTVMLDLPIEGTELHCEKQESQESAESVENLTSESEGDLGSYRGKKTSDISRTKLSASAEPYNPGGFLVIDLQSSAATIGSYPIMVADPISWAVVSCGIHSPPYYSAIHSNGVGTPRSMNPDAPEFVPRRSLQNSSQHAGEDASVSVDSSSCLKAEKDAVDLKKRELASFIVKSSQKEVPAALSKTSPEAESGGTSEKDSAVTEIVYSREEENGANANETNGGEGFVIVAKKRRRKNKVRLTNVAAGLYHQPSSVCA

SEQ ID NO: 1955 - protein, 637 aa, Cynara scolymus
MASSTTTPLLPHHHLQNPQQLAGSPAAHRLSRPTLLSGILVSVLVICALVAVIHNQSQQPYHDGGAKPSSSAATTTFPTASPEAGLKRFPIELKTNAEVEWQRSAYHFQPDKNYISDPDGPMYHMGWYHLFYQYNPESAIWGNITWGHSVSKDMINWFHLPFAMVPDQWYDIEGVMTGSATVLPDGQIIMLYTGNAYDLSQLQCLAYAVNSSDPLLLDWKKYEGNPILFPPPGVGYKDFRDPSTLWLGPDGEYRMVMGSKHNETIGCALIYHTTNFTHFELKEEVLHAVPHTGMWECVDLYPVSTTHTNGLDMVDNGPNVKHVLKQSGDEDRHDWYALGTYDVVNDKWYPDDPENDVGIGLRYDFGKFYASKTFYDQHKKRRVLWGYVGETDPPKYDVYKGWANILNIPRTIVLDTKTNTNLIQWPIAEVENLRSNKYNEFKDVELKPGSLIPLEIGTATQLDITATFEVDQTMLESTLEADVLFNCTTSEGSAGRGVLGPFGLVVLADAERSEQLPVYFYIAKDTDGSSKTYFCADESRSSNDVDIGKWVYGSSVPVLEGEKFNMRLLVDHSIVEGFAQGGRTVVTSRVYPAKAIYGAAKLFLFNNATGISVKASLKIWKMKEAQLDPFPLSGWSS

SEQ ID NO: 1956 - protein, 300 aa, Pneumocystis carinii
MEQYQRLEKIGEGTYGVVYKAKDLESGTIVALKKIRLEAEDEGVPSTAIREISLLKEMHNDNVVRLLNIIHQESRLYLVFEFLDLDLKKYMNSIPKDMMLGAEMIKKFMSQLVSGVKYCHSHRILHRDLKPQNLLIDREGNLKLADFGLARAFGVPLRGYTHEVVTLWYRAPEVLLGGRQYATALDIWSIGCIFAEMATKKPLFPGDSEIDEIFRIFRILGTPDENSWPGITSYPDFKATFPKWSPKNLGELITELDSDGIDLLQKCLRYYPAERISAKKALDHPYFDDFINLNRSNVVL

SEQ ID NO: 1957 - protein, 300 aa, Pneumocystis carinii
MEQYQRLEKIGEGTYGVVYKAKDLESGTIVALKKIRLEAEDEGVPSTAIREISLLKEMHNDNVVRLLNIIHQESRLYLVFEFLDLDLKKYMNSIPKDMMLGAEMIKKFMSQLVSGVKYCHSHRILHRDLKPQNLLIDREGNLKLADFGLARAFGVPLRGYTHEVVTLWYRAPEVLLGGRQYATALDIWSIGCIFAEMATKKPLFPGDSEIDEIFRIFRILGTPDENSWPGITSYPDFKATFPKWSPKNLGELITELDSDGIDLLQKCLRYYPAERISAKKALDHPYFDDFININRSNVVL

SEQ ID NO: 1958 - protein, 423 aa, Yersinia enterocolitica
MTDKRKDGSGKLLYCSFCGKSQHEVRKLIAGPSVYICDECVDLCNDIIREEIKEVAPHRERSSLPTPHEIRRHLDDYVIGQEPAKKVLAVAVYNHYKRLRNGDTSNGIELGKSNILLIGPTGSGKTLLAETLARFLDVPFTMADATTLTEAGYVGEDVENIIQKLLQKCDYDVQKAQRGIVYIDEIDKISRKSDNPSITRDVSGEGVQQALLKLIEGTIAAVPPQGGRKHPQQEFLQVDTSKILFICGGAFAGLDKVIGQRINTGSGIGFGATVKGKSEKATEGELLRQAEPEDLIKFGLIPEFIGRLPVVATLSELSEDALIQILKEPKNALTKQYQALFNLEGVELEFRDEALTAIAKKAMARKTGARGLRSIVEGALLDTMYDLPSMESVEKVVVDESVIAGQSAPMLIYGQPEAQASGE

SEQ ID NO: 1959 - protein, 477 aa, Stigmatella aurantiaca
MRRAKIVCTLGPASQSQDMLEALIEAGMDVARLNFSHGSHEQHAENIAKLRAASLKLRKAVGILGDLQGPKIRTGRFITGSTVLKEGAIFSITTDESVKGNDDIVSTTYAHLAADVNPGDRILLDDGLLELKVLETDKKQLLRTQVVIGGTLKNNKGINLPGVAVRADALTPKDREDLVFGIKEGVDFLALSFVRQPADIELARQAMAEAGRQVPIVAKLEKPEAIARLDAILDKTDGVMVARGDLGVEIPPEEVPAVQKDIIRRSNQRGLPVIVATQMLNSMIENPRPTRAEASDVANAVFDGADAVMLSGETASGRYPIESVQMMDRIVLAAESAGRAQSSLGRIPDGPIGVPSHFPDVIARVACQAAQASGASLIAAFTLSGVTARLLAHYRPAVPIVAFSPNQEVRRRLALLWGVVPRVLEPIQETEAMVKRVEEELLARGLARKGERIVIVFGAPVGQPGKINSLRLHTIQG

SEQ ID NO: 1960 - protein, 489 aa, Cucumis sativus
MLGQKQAEEAIVPTTANEVEHGGGKEEGEEADGGEQPQNSVFQMKNLLWHGGSAWDAWFSCASNQVAQVLLTLPYSFAQFGMLSGIIFQIFYGLIGSWTAYLISVLYIEYRSRKEKENVNFKNHVIQWFEVLDGLLGPHWKALGLAFNCTFLLFGSVIQLIGCASNIYYINDHLDKRTWTYIFGACCATTVFIPSFHNYRIWSFLGLGMTTYTAWYLAARALIHGQTEGVTHSGPTKLVLYFTGATNILYTFGGHAVTVTVEIMQSDVETQKFKYIYLMATLYVFTLTLPSASAVYWAFGDELLNHSNAFSLLPKNRFRDAAVILMLIHQFITFGFACTPLYFVWEKVIGMHDTKSLCLRALVRLPVVVPIWFLAIIFPFLGPINSAVGALLVSFTVYIIPAAAHMLTYRKASAKQNAAEKPPFFLPSWTAMYVLNSFIVVWIFVFGFGFGGWATITNFVRQINSFGLFAKCYQCKPSHPPAPPPTHRH

SEQ ID NO: 1961 - protein, 702 aa, Lotus japonicus
MARKLRFFKEQMLKAGVSPKLSTTQVDVNIDNLEVKLSEIESELTEMNANGEKLQRSYNELVEYKLVLQKAGEFFHSAQSGAIEQQREYESRLLSGESMETPLLQDQELSGDSSKQIKLGFLAGLVPREKSMTFERILFRATRGNVFLRQTAVEDPVTDPVSGEKTEKNVFVVFYAGEKVKAKILKICDAFSANRYPFAEELGKQAQMITEASGKISELKTTIDTGLQHRVNLLDTIGVQFEQWNLLIQDALQRAAVDSNSQVSAIFQVLHTKEMPPTYFRTNKFTSSYQGIIDSYGVAKYQEANPTVYTVVTFPFLFAVMFGDWGHGICLLLAALYFIIRERKLSSQKLDDITEMTFGGRYVILLMSLFSIYTGLIYNEFFSVPFELFGPSAYECRDLACSEATTIGLIKARRTYPFGVDPVWHGTRSELPFLNSLKMKMSILLGVAQMNLGIIMSFFNAIFFRNSVNICLFGYLSLLIIVKWCTGSQADLYHVMIYMFLSPTDDLGENELFAGQKNLQLVLLLLAVVAVPWMLLPKPFILKKQHEARHGAESYAPLPSTEESLQVESNHDSHGHEEFEFSEIFVHQLIHTIEFVLGAVSNTASYLRLWALSLAHSELSSVFYEKVLLLAWGYNNVIILIVGILVFIFATVGVLLVMETLSAFLHALRLHWVEFQNKFYEGDGYKFFPFSFSLLDEEDEVL

SEQ ID NO: 1962 - protein, 659 aa, Chlamydophila abortus
MSEQKKSSKIIGIDLGTTNSCVSVMEGGQAKVIVSSEGTRTTPSIVAFKGNETLVGIPAKRQAVTNPAKTLASTKRFIGRKYSEVESEIKTVPYQVASGSNGDVVFPIDGKQFTPEEIGAQVLIKMKETAEAYLGEPVTEAVITVPAYFNDSQRASTKDAGRIAGLDVKRIIPEPTAAALAYGIDKAGDKKIAVFDLGGGTFDISILEIGDGVFEVLSTNGDTHLGGDDFDEVIIKWMIEEFQKQEGIDLSKDNMALQRLKDAAEKAKIELSGMSSTEINQPFITMDANGPKHLTLTLTRAHFEKLASNLIERTKAPCQKALADAKLSASDIDDVLLVGGMSRMPAVQEVVKSIFGKEPNKGVNPDEVVAIGAAIQGGVLGGEVKDVLLLDVIPLSLGIETLGGVMTPLVERNTTIPTQKKQIFSTAADNQPAVTIVVLQGERPMAKDNKEIGRFDLTDIPPAPRGHPQIEVTFDIDANGILHVSAKDAASGREQKIRIEASSGLKEDEIQRMINDAEKNKEEDKKRREASDVRNEADSMIFRAEKAISDYKENIPESLTKEIEERIEKVRSALKEDAPTEKIKEASDELSRHMQKIGEAMQSQSASAAANAQDGPNINTEDLKKHSFSTKPPTGNSSSSANNENIEEADVEIVDKPND

SEQ ID NO: 1963 - protein, 542 aa, Escherichia coli
MVSALWTVELNDSKTGTHVGLRHKHTFLCTLFRCHLSLERGTTTFVIPDSLSGSAPRKQVSPILLNLKTKTVMKKTKIVCTIGPKTESEEMLAKMLDAGMNVMRLNFSHGDYAEHGQRIQNLRNVMSKTGKTAAILLDTKGPEIRTMKLEGGNDVSLKAGQSFTFTTDKSVIGNSEMVAVTYEGFTTDLSVGNTVLVDDGLIGMEVTAIEGNKVICKVLNNGDLGENKGVNLPGVSIALPALAEKDKQDLIFGCEQGVDFVAASFIRKRSDVIEIREHLKAHGGENIHIISKIENQEGLNNFDEILEASDGIMVARGDLGVEIPVEEVIFAQKMMIEKCIRARKVVITATQMLDSMIKNPRPTRAEAGDVANAILDGTDAVMLSGESAKGKYPLEAVSIMATICERTDRVMNSRLEFNNDNRKLRITEAVCRGAVETAEKLDAPLIVVATQGGKSARAVRKYFPDATILALTTNEKTAHQLVLSKGVVPQLVKEITSTDDFYRLGKELALQSGLAHKGDVVVMVSGALVPSGTTNTASVHVL

SEQ ID NO: 1964 - protein, 477 aa, Escherichia coli
MMTMSRLVVVSNRIAPPDEHAASAGGLAVGILGALKAAGGLWFGWSGETGNEDQPLKKVKKGNITWASFNLSEQDLDEYYNKFSNAVLWPAFHYRLDLVQFQRPAWDGYLRVNALLADKLLPLLQDDDIIWIHDYHLLPFAHELRKRGVNNRIGFFLHIPFPTPEIFNALPTYDTLLEQLCDYDLLGFQTENDRLAFLDCLSNLTRVTTRSAKSHTACGKAFRTEVYPIGIEPKEIAKQAAGPLPPKLAQLKAELKNVQNIFSVERLDYSKGLPERFLAYEALLEKYPQHHGKIRYTQIAPTSRGDVQAYQDIRHQLENEAGRINGKYGQLGWTPLYYLNQHFDRKLLMKIFRYSDVGLVTPLRDGMNLVAKEYVAAQDPANPGVLVLSQFAGAANELTSALIVNPYDRDEVAAALDRALTMSLAERISRHAEMLDVIVKNDINHWQECFISDLKQIVPRSAESQQRDKVATFPKLA

SEQ ID NO: 1965 - protein, 353 aa, Escherichia coli
MGLFVKIVAVALLHKHCRESFMKTLGEFIVEKQHEFSHATGELTALLSAIKLGAKIIHRDINKAGLVDILGASGAENVQGEVQQKLDLFANEKLKAALKARDIVAGIASEEEDEIVVFEGCEHAKYVVLMDPLDGSSNIDVNVSVGTIFSIYRRVTPVGTPVTEEDFLQPGNKQVAAGYVVYGSSTMLVYTTGCGVHAFTYDPSLGVFCLCQERMRFPEKGKTYSINEGNYIKFPNGVKKYIKFCQEEDKSTNRPYTSRYIGSLVADFHRNLLKGGIYLYPSTASHPDGKLRLLYECNPMAFLAEQAGGKASDGKERILDIIPETLHQRRSFFVGNDHMVEDVERFIREFPDA

SEQ ID NO: 1966 - protein, 597 aa, Physcomitrella patens
MNPDGVTYFEGLMEVEQISSNLVILEEDYDGWYRSRGELDERMFINGEDSLIGAVSSSSTTSVCGVKRKRDAVTSAGQGRAVSSGASPSSPCGSPESSPAVMGGVAGGSTCKPPPTPVSITMTTAKWLRTVIAPLSAEPSPELERYLRVFERNIASEMKVRANVILGGIFEARKWRGAGEAGTSDSMWGDQRRLEALKLYYKVLGAMCTAESHRLRSEHLPFLPNERFHRCMLACSAELVLASHKTVTMTFPAVLEPAGITAFDLSKVIEGFVRHEETLPRELKRHLNSIEERLLESMAWEKGSSMFNCLAIAKANLAPEINRLKLMAEPMPALDTSKAQQRSPVDTADGRIGGSKVDDPAGESKGGAASPPRQGSMTAVKGNAGATGGSAEQGESASFMSPARGPSAFTAFSSPQKSRAMPPLLLAFASPQRPNPQAGGETCAETCINVFFQKVLKLAAVRIRNLCERLQQSQQVVERVNRALHHALNHETGLFFNRHIDQIILCCVYGICKVSKVNVTFRDIIYHYRKQPQCKPYVFRNVLLDGSVVWRSGKAGQETGDIIRFYNEVFVPSTKSFLLQVGSSAGVAVPKQRWCSL

SEQ ID NO: 1967 - protein, 437 aa, Methanothermobacter thermautotrophicus
MLLGDLRRTHYSKDIEPEMDGDEVTVMGWVHEIRDLGGIIFVLLRDRDGLIQITAPSKKIEKDLFKSIRKLKKESVVAFGGTVQESGKAPGGFEIIPSFLKVLNISKQPLPLDPTEKVKAEIDTRLDARFLDLRKPSVSAIFKIKSRMLHSVRVFLEEQGFLEINTPKLVASATEGGTELFPITYFEREAFLGQSPQLYKQIMMSTGLDRVYEIAPIFRAEEHDTLRHLNEVISIDIEASFVDHEDVMKILENLVVRVIEDVNEHCTDALETLGRTLEVPETPFERLEYDEAVEMVNSKGVPMKHGEDLPRAAEKALGEIMDGYYFITSWPTAIKPFYVMPDEDDPERSHAFDLMYRDLEISSGAMRVHQHDLLVEKIKRQGLNPDSFESYLSAFEYGMPPHAGWGLGAERFNMTLTGLKNIRETVLFPRDRRRLTP

SEQ ID NO: 1968 - protein, 584 aa, Methanothermobacter thermautotrophicus
MTQEGRIIKIAGPVIIAEGMRGSQMYEMVKVGEDKLIGEIIELEGDTATIQVYEETAGIKPGETVERTGGPLSVELGPGILGSIFDGIQRPLENIKALTGDYIERGVDVPSLPKDKKWTFKPTAREGQMVKGGDIIGEVEETSSITHRIMIPPNVEGKLTMIAPQGEYTVLDDIAEVETESGTEKIQMLQKWPVRKGRPYKKKLDPDVPLVTGQRAQDTFFSVAKGGTAAIPGPFGSGKTVTQQQLAKWADADIIVYVGCGERGNEMTEVLKEFPELEDPKTGNPLMDRTVLIANTSNMPVAAREACVYTGITIAEYFRDMGYDVALMADSTSRWAEAMREISGRLEEMPGEEGYPAYLASRLAQFYERAGRVTTIGSEDKIASVSVVGAVSPPGGDLSEPVTQNTLRICKVFWALDASLADKRHFPSIDWLQSYSLYIDSVQEWWASNVDPEWRKFRDEAMALLQKEAELQEIVQLVGPDALPDRERITLETTRMIREDFLQQNAYHEVDTYCSPSKQFEMLRTIIMFHRNATAALEKGAPAADIISLPVKEDIGRMKYIPEEEFPARIKEIQERIVKECSEV

SEQ ID NO: 1969 - protein, 564 aa, Vibrio cholerae
MGKIIGIDLGTTNSCVAVLDWRQARVIENAEGERTTPSVIAYTDGETLVGQPAKRQAVTNPQNTLFAIKRLIGRRFEDEEVQRDIKIMPYKIVKADNGDAWVEAKGQKMAAPQVSAEVLKKMKKTAEDFLGEPVTAAVITVPAYFNDAQRQATKDAGRIAGLEVKRIINEPTAAALAYGLDKQGGDRTIAVYDLGGGTFDISIIEIDEVEGEKTFEVLSTNGDTHLGGEDFDNRMINYLVDEFKKDQGIDLRNEPLAMQRLKEAAEKAKIELSSAQQTDVNLPYITAPITGPKHMNIKVTRAKLEALVEDLVQRSLEPLKVALADADLSVTDITDVILVGGQTRMPMVQKKVAEFFGKEPRKDVNPDEAVRVGAAVQGGVLAGEVKDVLLLDVTPLSLGIETMGGVMTKLIEKNTTIPTKANQVFSTAEDNQSAVTIHVLQGERKQAMYNKSLGQFNLEGINPAPRGMPQIEVIFDLDADGILHVSAKDKQTGKEQKITIQASGGLSDAEIEKMVQEAEANKEADKKFEELATARNQADQMIHATRKQITEAGEALPADEKAKI

SEQ ID NO: 1970 - protein, 756 aa, Pisum sativum
MWKLKVAEGGTPWLRTLNNHVGRQVWEFDPHSGSPQDLDDIETARRNFHDNRFTHKHSDDLLMRLQFAKENPMNEVLPKVKVKDVEDVTEEAVATTLRRGLNFYSTIQSHDGHWPGDYGGPMFLMPGLVITLSVTGALNAVLTDEHRKEMRRYLYNHQNKDGGWGLHIEGPSTMFGSVLCYVTLRLLGEGPNDGEGDMERGRDWILEHGGATYITSWGKMWLSVLGVFEWSGNNPMPPEIWLLPYALPVHPGRMWCHCRMVYLPMSYLYGKRFVGPITPTVLSLRKELFTVPYHDIDWNQARNLCAKEDLYYPHPLVQDILWATLHKFVEPVFMNWPGKKLREKAIKTAIEHIHYEDENTRYICIGPVNKVLNMLCCWVEDPNSEAFKLHLPRIYDYLWVAEDGMKMQGYNGSQLWDTAFAAQAIISTNLIDEFGPTLKKAHAFIKNSQVSEDCPGDLSKWYRHISKGAWPFSTADHGWPISDCTAEGLKAVLLLSKIAPEIVGEPLDSKRLYDAVNVILSLQNENGGLATYELTRSYTWLEIINPAETFGDIVIDCPYVECTSAAIQALATFGKLYPGHRREEIQCCIEKAVAFIEKIQASDGSWYGSWGVCFTYGTWFGIKGLIAAGKNFSNCLSIRKACEFLLSKQLPSGGWAESYLSCQNKVYSNLEGNRSHVVNTGWAMLALIEAEQAKRDPTPLHRAAVCLINSQLENGDFPQEEIMGVFNKNCMITYAAYRCIFPIWALGEYRRVLQAC

SEQ ID NO: 1971 - protein, 420 aa, Bacillus subtilis
MFKFNEEKGQLKCSFCGKTQDQVRKLVAGPGVYICDECIELCTEIVEEELGTEEEVEFKDVPKPQEIREILNEYVIGQDQAKKSLAVAVYNHYKRINSNSKVDDVELSQSNISLIGPTGSGKTLLAQTLARILNVPFAIADATSLTEAGYVGEDVENILLELIQAADYDVEKTGKGIIYIDEIDKVARKSENPSITRDVSGEGVQQALLKILEGTVASVPPQGGRKHPHQEFIQIDTTNILFICGGRFDGIEQIIKRRLAQKVIGFGADNKAADLEKEDLLSKVLPEDLLRFGLIPEFIGRLPVIASLEKLDEEALVAILTKPKNALVKQFKKMLELDNVELEFEEEALSEIAKKAIERKTGARGLRSIIEGIMLDVMFELPSRDDIEKCVITGATVTHGEPPRLLLKDGTEVSQDKTSA

SEQ ID NO: 1972 - protein, 209 aa, Arabidopsis thaliana
MDQMLSGEQDLEVDIEAGRSDVTQESTSDTVSGNGVWSERANFGVSEKIADDLSYPLIRDENRVETSSQSLDLSEKKCGNGKFKKSRKASKPPRPPKGPSLSENDRKIMRDIQELAMRKRARIERMKKSLKRLKAAKTSPSSPCITIFSMIITAIFFAFLVFQGTFLLIPFSTLNENQKMLLWSSYEFVSEERFYIVLDSLLLRYSDIT

SEQ ID NO: 1973 - protein, 1039 aa, Arabidopsis thaliana
MTHHHRRESFSVTPSTMGGSVVLCPNTDLLWPFGKLEGLDRDDIRETAYEIFFTACRSSPGFGGRTALTFYSNHNSNDHHGDGGGGIGSGGSTGVGSGFGSSGRKEVVTTPTSRVKRALGLKMLKRSPSRRMSTIGAAGGAATSLSPGGMNSSAGHISPGAGFLTVQPSRPRRPLTSAEIMRQQMKVTEQSDSRLRKTLLRTLVGQTGRRAETIILPLELLRHLKTSEFGDIHEYQLWQRRQLKVLEAGLLLHPSIPLDKTNNFAMRLREVVRQSETKPIDTSKTSDTIRTLTNVVVSLSWRGTNGNPTDVCHWADGYPLNIHLYVALLQSIFDVRDETLVLDEIDELLELMKKTWSTLGITRPIHNLCFTWVLFHQYVVTSQMEPDLLGASHAMLAEVANDAKKLDREALYVKLLNSTLASMQGWTEKRLLSYHDYFQRGNVGLIENLLPLALSSSRILGEDVTISQGKGQEKGDVKLVDHSGDRVDYYIRSSIKNAFSKVIENTKAKIAATDEGEEAAGTLLQLAKETEELALRERECFSPILKRWHSVAAGVASVSLHQCYGSILMQYLAGRSFISRDTVEVLQTAGKLEKVLVQMVAEDSEECEDGGKGLVREMVPYEVDSIILRLLRQWVEEKLKAVQECLFRAKETETWNPKSKSEPYAQSAGELMKLAKDTIDEFFEIPIGITEDLVHDIAEGLEQLFQEYTTFVASCGARQSYIPTLPPLTRCNRDSRFVKLWKRATPCTTSNEDLKYTTSVISDGHHPRPSTSRGTQRLYIRLNTLHFLSSHIHSLNKTLSLNPRILPATRKRYRHRNNNSSSYFDFTYAGIESACQHVSEVAAYRLIFLDSNSVLYESLYVGEVANARIRPALRIMKQNLTLMSAILADRAQSLAMREVMKSSFEAFLMVLLAGGYSRVFYRSDHSIIEEDFENLKRVFCTCGEGLIPEEVVDREAETVEGVIQLMSQPTEQLMEDFSIVTCETSGMGMVGSGQKLPMPPTTGRWNRSDPNTILRVLCHRNDRVANQFLKKSFQLPKRR

SEQ ID NO: 1974 - protein, 675 aa, Spinacia oleracea
MATALRRCLRPEQFRSFPAFKSLAGNASPSLSSPYMAQRLASLVRPFSSRPAGNDVIGIDLGTTNSCVSVMEGKSAKVIENAEGARTTPSVVAFNPKGELLVGTPAKRQAVTNPTNTIFGTKRLIGRVFSDPQTQKEMKMVPYKIVKAPNGDAWVEANGQQYSPSQVGAFVLTKMKETAEAYLGKTVSKAVVTVPAYFNDAQRQATKDAGKIAGLDVQRIINEPTAAALSYGMTNKEGLIAVFDLGGGTFDVSILEISNGVFEVKATNGDTFLGGEDFDNTLLEFLVSEFKKTEGIDLSSDRLALQRLREAAEKAKIELSSTSQTDISLPFISADSSGAKHLNITLSRSKFESLVGNLIERTRAPCKNCLKDAGVSLNEVDEVLLVGGMTRVPKVQEIVQEIFGKSPSKGVNPDEAVAMGAAIQGGILRGDVKDLLLLDVTPLSLGIETLGGVFTRLINRNTTIPTKKSQVFSTAADNQTQVGIKVLQGEREMASDNKMLGEFELQGIPPAPRGLPQIEVTFDIDANGIVTVSAKDKATNKEQNITIKSSGGLSEHEIEKMVKEAEIHAQKDQERKSLIDARNTADTTIYSVEKSLGEYREKIPTEIAKEIEDAVSDLRSAMQNDNLEEIKAKTDAANKAVSKIGEHMSGGQGGGSSSSGGADQTPEAEYEEAKK

SEQ ID NO: 1975 - protein, 579 aa, Arabidopsis thaliana
MAAALRSNTSRETASLTLSHFRYFIFNRIHTARTATSPPHCNHRSKSDEKFPYKISSLGTSFLDNRGGGERRNSTKCYAAQKKLSGVGSSVVILSSQGDPPDLWQPPGDGVSVRVNGSSVNLGRGGGGGGSNPGGPGNGTGSNSKEDCWGGSNLGSDFPTPKEICKGLNKFVIGQERAKKVLSVAVYNHYKRIYHESSQKRSAGETDSTAAKPADDDMVELEKSNILLMGPTGSGKTLLAKTLARFVNVPFVIADATTLTQAGYVGEDVESILYKLLTVADYNVAAAQQGIVYIDEVDKITKKAESLYISRDVSGEGVQQALLKMLEGTIVNVPEKGARKHPRGDNIQIDTKDILFICGGAFVDIEKTISERRHDSSIGFGAPVRANMRAGGVTTAAVASNLMETVETSDLIAYGLIPEFVGRFPVLVSLSALTENQLMQVLTEPKNALGKQYKKMYQMNSVKLHFTESALRLIARKAITKNTGARGLRALLESILMDSMYEIPDEGTGSDMIEAVVVDEEAVEGEGRRGSGAKILRGKGALARYLSETNSKDSPQTTKEGSDGETEVEAEIPSVVASM

SEQ ID NO: 1976 - protein, 635 aa, Borrelia burgdorferi
MGKIIGIDLGTTNSCVAIMEHGKPVVIQNSEGGRTTPSIVAYTNKGERLVGQVAKNQMVTNPENTIYSIKRFMGRRFEEVASEIKMVPYKIEKGLNGDARVNISNIKKQMSPPEISAATLTKMKETAEAYLGEKVTEAVITVPAYFNDAQRQATKDAGKIAGLEVKRIVNEPTAAALAYGIEKKHEEIVAVYDLGGGTFDISILELGDGVFEVKSTNGDTHLGGDNFDDEIIKHLISEFKKESAIDLSNDKMALQRLKEAAEKAKIELSGAQEASINLPFITADANGPKHLQYTLTRAKFEQMVDHLVQKTKEPCLKAIKDAGLKASDINEVILVGGSTRIPAIQKIVKDIFGQDPNKGVNPDEAVAIGAAIQGGILTGETKDMVLLDVTPLSLGIETLGGVMTKLIERNTTIPTKKSQVFSTAADNQTSVDIKVLQGEREMAAQNRILGNFILDGIPAAPRGVPQIEVSFDIDANGIVHVSAKDMGTGKEQKIRIESSSGLSESEIDRMVKDAEAHAEEDKKLKENIEAKNTANSLIYQTEKSLKEYSEKISSEDKEAIESKIKELKESLEKEDISLIKSRTEELQKASYKIAEMMYKDSSQQNANSQQENGPQSNTSEEGKEADYEVVDEDKK

SEQ ID NO: 1977 - protein, 677 aa, Lolium temulentum
MPMETRDGGSRLEPALLPCSYVPLPDDAEAAVVGRGHRTGPLFAALLLALAAVLLVVATLAGVRLVGQLPATGVVMLNQPVDEAMSTTSSSRGPESGVSEKTSGVPAEHGGMLAADAASSNAFPWSNAMLQWQRTGFHFQPEKNWMNDPNGPVYYKGWYHLFYQYNPDGAIWGNKIAWGHAVSRDLVRWRHLPIAMFPDQWYDINGAWSGSATVLPDGRIVMLYTGSTNASVQVQCLAFPSDPSDPLLTNWTKYEGNPVLYPPPHIGEKDFRDPTTAWYDGSDGMWRIVIGSKDDRHAGMALTYKTNNFIDFELIPGVLHRVPATGMWECIDLYPVGAARGIDMTEAVAAASNNGGGEVLHVMKESSDDDRHDYYALGRYDAATNKWTPLDADADVGIGLRYDWGKFYASKTFYDPAKKRRVLWGWVGETDSERADVAKGWASLQSTPRTVVLDNKTGSNLIQWPVVEVETLRTNSTNLGSITVDHGSIFPLSLHRATQLDIEASFRLDPLDVVAAKEADVGYNCSTSGGAAGRGALGPFGLLVLADARRHGGDTEQTAVYFYVARGLDGGLRTHFCHDESRSSRANDIVKRVVGNVVPVLDGEALSIRVLVDHSIVESFAQGGRSTVTSRVYPTEAIYANTGVYLFNNATGARVTATSLAVHEMDFSYNQAYMASL

SEQ ID NO: 1978 - protein, 625 aa, Lolium temulentum
MESRAIPSAAYAALLPSAADDVALAKQDRPGVGWRGFLTVLAASGVVVLLVGATLLAGSRMGQAGDGEGNTDEDGAGGFPWSNEMLQWQRAGFHYQPEGHFMSDPNGPVYYRGYYHLFFQYNRRGVAWDDYIEWGHVVSQDLVHWRPLPLAMRPDHWYDKKGVLSGTITVLHNGTLVLLYTGVTEDPMAESQCIAVPTDPNDPLLRHWTKHPANPVLAHPQGVQGMDFRDPTSAWWDKSDATWRILIGSKDDDNGSHAGIAFIFKTKDFLSFERVPGIVHRVEGTGMWECIDFYPVGGGHSSSSSEELYVIKASMDDERHDYYSLGRYDAAANTWTPLDAELDLGIGLRYDWGKLYASTSFYDPLKQRRIMLGYVGEVDSARADVAKGWASLQSIPRTVALDEKTRTNLLLWPVEEVEALRYNSTDLSGITIDDGSVFHLPLHQATQLDIEATFRLDASDVAAINEADVGYNCSSSGGAAARGALGPFGLLVHAAGDLIRGEQTAVYFYVSRALDGTLRTSFCNDETRSTRAKDVTKRVVGSTVPVLDGEALSMRVLVDHSIVQSFAMGGRVTATSRVYPTEAIYARAGVYLFNNATGASVTAERLVVHEMASAVYDDTVMVEDS

SEQ ID NO: 1979 - protein, 533 aa, Lolium temulentum
SNAMLQWQRTGFHFQPEMNWMNDPNGPVYYRGWYHLFYQYNPEGAVWGNIAWGHAVSRDLVHWRHLPLAMVPDQWYDINGVWTGSATVFPDGTLNMLYTGSTNASVQVQCLAVPEDPNDSLLRNWTKHEANPVLLPPPGIGDKDFRDPTTAWFDESDQTWRTVIGSKDNNGHAGIAMVYKTKDFLNYELIPGYLHRVDGTGMWECIDFYPVGGKNGSEELYVIKESSDDDRHDWYTLGKYDAAANTFTAADPENDLGIGLRYDWGKFYASKTFYDPAKQRRVLWGWIGETDSERADVAKGWASLMSIPRTVELDEKTRTNLIQWPVEEIETLRINSTDLSGVTIDHGSVYPLALHRATQLDIEASFRLDSATIAALNEADVGYNCSTSGGSANRGALGPFGLLVLADGKAEQTAVYFYVAKGLDGSLQTHFCHDESRSTLAKDVVKRVVGYTVPILDGEAFSMRVLVDHSIVESFVMGGRSTATSRVYPTEAIYGAAGAYLFNNATSGTVTVEKLVVHEMDSSYNQIFMADDL

SEQ ID NO: 1980 - protein, 231 aa, Lolium temulentum
MESRSIPGAYAYAYEPLPRSSDDDRRSTGGVRWRACAAVLAASALVVFVVASTLAGSRVDRVAVDVAAMPALSETARSRGRDAGVSEKTSGAADEMGFLGAGSGADADGFPWSNAMLQWQRTGFHFQPEMNWMNDPNGPVYYRGWYHLFYQYNPEGAVWGNIAWGHAVSRDLVHWRHLPLAMVPDQWYDINGVWTGSATVFPDGTLNMLYTGSTNASVQVQCLAVPEDPND

SEQ ID NO: 1981 - protein, 442 aa, Pseudomonas putida
MPSSCVASLPDWIDRMTDTRNGEDSGKLLYCSFCGKSQHEVRKLIAGPSVFICDECVDLCNDIIREEVQEAQAESSAHKLPSPKEISGILDQYVIGQERAKKVLAVAVYNHYKRLNQRDKKGDEVELGKSNILLIGPTGSGKTLLAETLARLLNVPFTIADATTLTEAGYVGEDVENIIQKLLQKCDYDVEKAQMGIVYIDEIDKISRKSDNPSITRDVSGEGVQQALLKLIEGTVASVPPQGGRKHPQQEFLQVDTRNILFICGGAFSGLEKVIQNRSTKGGIGFGAEVRSKEEGKKVGESLREVEPDDLVKFGLIPEFVGRLPVLATLDELDEAALMQILTEPKNALTKQYAKLFEMESVDLEFRSDALKAVARKALERKTGARGLRSILEGVLLDTMYEIPSKKDVSKVVIDESVIEGTSQPLMIYENSEPQAKAAPDA

SEQ ID NO: 1982 - protein, 63 aa, Alexandrium tamarense
MRGILADWLVEVAEEYKLCADTLYLSVNYIDRFLSIHPVQRSNLQLVGIACMWIASKYEEIYP

SEQ ID NO: 1983 - protein, 63 aa, Prorocentrum minimum
MRGILTDWLVEVAEEYKLCADTLYLSVNYIDRFLSIHPVQRSNLQLVGIACMWIASKYEEIYP

SEQ ID NO: 1984 - protein, 63 aa, Prorocentrum minimum
MRGILVDWLVEVAEEYKLCADTLYLSVNYIDRFLSIHPVQRSNLQLVGIACMWIASKYEEIYP

SEQ ID NO: 1985 - protein, 238 aa, Oryza sativa
MAGAAAAVEDAGMDEVQKRLMFDDECILVDEQDNVVGHESKYNCHLMEKIESENLLHRAFSVFLFNSKYELLLQQRSATKVTFPLVWTNTCCSHPLYRESELIQENYLGVRNAAQRKLLDELGIPAEDVPVDQFTPLGRMLYKAPSDGKWGEHELDYLLFIVRDVKVVPNPDEVADVKYVSREQLKELIRKADAGEEGLKLSPWFRLVVDNFLMGWWDHVEKGTLNEAVDMETIHKLK

SEQ ID NO: 1986 - protein, 415 aa, Heliobacillus mobilis
MKKRVVITGVGVVSPVGTGKEKFWDSLTSGVSGIGPVTRFDATDLPTRVAAEVKDFDPTKFLDRKEARRMDRFAQYAVAASKMAMEDSGLDMEKADRERAGVILGCGIGGMETFEDQAKVMINKGNGRISPFFVPMMISNMAAGHISMQLNLKGPSETVVTACASATNACGSALRLLQHGDCDVVLTGGTEASIIQLSFAGFCAMKAMSTLNDDPAKASRPFDRDRSGFVMGEGAGILVFEELEHALARGAHIYAEVVGYGSSCDAYHITDPAPNGEGAARAMQGALKDAGLKPEDIDYINAHGTATEKNDYYETLAIKSVFGDHAQKVAISSTKSMTGHLLGAAGGIELIATALAIHDGIIPPTINLDNPGEGCDLDYVPHEARKIPVEAAISNTFGFGGHNATVALCKYRPGE

SEQ ID NO: 1987 - protein, 420 aa, Heliobacillus mobilis
MYKGFGDDKGQLKCSFCGKLQDQVKKLVAGPGVYICDECIELCNEIIEEELQDENTFDLGDVPKPKEIREILDQYVIGQDQAKKALSVAVYNHYKRINLGSKIDDIELQKSNIVMLGPTGSGKTLLAQTLARILNVPFAIADATSLTEAGYVGEDVENILLKLIQAADYDVEKAEKGIVYIDEIDKIARKSENPSITRDVSGEGVQQALLKILEGTVASVPPQGGRKHPHQEFIQLDTTNILFICGGAFDGIDKLIMNRVGKKAMGFNADIKGKQDKNIGEVLRDILPGDLLKFGLIPEFVGRLPVIVTLDALDEDALVRILTEPKNALIKQYQKFFELDQVNLEFQDEALRAIAHEAIKRNTGARGLRAIIEEVMLDVMFDIPSRNDVTKCMVTKEVILKQKEPVLVTADRKKKKEESA

SEQ ID NO: 1988 - protein, 480 aa, Arabidopsis thaliana
MVVQNVQDLDVLPKHSSDSFDDDGRPKRTGTVWTASAHIITAVIGSGVLSLAWAVAQIGWIGGPVAMLLFSFVTFYTSTLLCSCYRSGDSVTGKRNYTYMDAIHSNLGGIKVKVCGVVQYVNLFGTAIGYTIASAISLVAIQRTSCQQMNGPNDPCHVNGNVYMIAFGIVQIIFSQIPDFDQLWWLSIVAAVMSFAYSAIGLGLGVSKVVENKEIKGSLTGVTVGTVTLSGTVTSSQKIWRTFQSLGNIAFAYSYSMILIEIQDTVKSPPAEVNTMRKATFVSVAVTTVFYMLCGCVGYAAFGDNAPGNLLAHGGFRNPYWLLDIANLAIVIHLVGAYQVYCQPLFAFVEKEASRRFPESEFVTKEIKIQLFPGKPFNLNLFRLVWRTFFVMTTTLISMLMPFFNDVVGLLGAIGFWPLTVYFPVEMYIAQKNVPRWGTKWVCLQVLSVTCLFVSVAAAAGSVIGIVSDLKVYKPFQSEF

SEQ ID NO: 1989 - protein, 682 aa, Arabidopsis thaliana
MASVALLRSFRRREVQMASVSAFKSVSANGKNSMFGKLGYLARPFCSRPVGNDVIGIDLGTTNSCVSVMEGKTARVIENAEGSRTTPSVVAMNQKGELLVGTPAKRQAVTNPTNTIFGSKRLIGRRFDDPQTQKEMKMVPYKIVKAPNGDAWVEANGQKFSPSQIGANVLTKMKETAEAYLGKSINKAVVTVPAYFNDAQRQATKDAGKIAGLDVQRIINEPTAAALSYGMNNKEGVIAVFDLGGGTFDVSILEISSGVFEVKATNGDTFLGGEDFDNTLLEYLVNEFKRSDNIDLTKDNLALQRLREAAEKAKIELSSTTQTEINLPFITADASGAKHLNITLTRSKFEGLVGKLIERTRSPCQNCLKDAGVTIKEVDEVLLVGGMTRVPKVQEIVSEIFGKSPCKGVNPDEAVAMGAAIQGGILRGDVKDLLLLDVVPLSLGIETLGAVFTKLIPRNTTIPTKKSQVFSTAADNQMQVGIKVLQGEREMAADNKVLGEFDLVGIPPAPRGMPQIEVTFDIDANGITTVSAKDKATGKEQNITIRSSGGLSDDEINRMVKEAELNAQKDQEKKQLIDLRNSADTTIYSVEKSLSEYREKIPAEIASEIETAVSDLRTAMAGEDVEDIKAKVEAANKAVSKIGEHMSKGSGSSGSDGSSGEGTSGTEQTPEAEFEEASGSRK

SEQ ID NO: 1990 - protein, 957 aa, Arabidopsis thaliana
MFEEKIMDIGEDVKPLNSSDTKVDPAVPASLTWQRKIDSDVKAPREFNLSVKEIFQLAPVGIRLWFLCREEAAKGRLAFIDPFSKHSVTSSHGVPLGGIGAGSIGRSFKGEFQRWQLFPPKCEDEPVLANQFSAFVSRANGKKYSSVLCPRNPKLDKQDSESGIGSWDWNLKGDKSTYHALYPRSWTMYEGEPDPELRIVCRQVSPFIPHNYKESSFPVSVFTFTLHNLGNTTADVTLLFTWANSVGGDSEFSGGHYNSKITMNDGVQGVLLHHKTANGLPSLSYAISAQATDGVSVSACPFFIVSGKQDGITAKDMWQAVKENGSFDHLKASEASMQSDHGSSIGAAVAASVTVLPGESRIVTFSLAWDCPEVQFPSGKIYSRRYTKFYGNNGDAAAQIAHDAILGHSQWESWIEDWQRPILEDKRLPAWYPVTLFNELYYLNSGGTLWTDGSSPVHSLAGVREKKFSLDKSQLGLKNDIDVPHQNDTAVSVLEKMASTLEELHASTTSNSAFGTKLLEEGEENIGHFLYLEGIEYRMWNTYDVHFYASFALVMLFPKLELSIQRDFAAAVMLHDPTKVKTLSEGQWVQRKVLGAVPHDLGINDPWFEVNGYTLHNTDRWKDLNPKFVLQVYRDVVATGDKKFASAVWPSVYVAMAYMAQFDKDGDGMIENEGFPDQTYDTWSASGVSAYCGGLWVAALQAASALARVVGDKNSQDYFWSKFQKAKVVYEKKLWNGSYFNYDNSGSQYSSTIQADQLAGQWYARASGLLPIVDEDKARTALEKVYNYNVMKIKDGKRGAVNGMHPNGKVDTASMQSREIWSGVTYALSATMIQEGLVEMAFQTASGIYEAAWSETGLGYSFQTPESWNTVDEYRSLTYMRPLAIWAMQWALTKTSQKQEQLGLEPEQQEPELEPSSSMKHDIGFSRVSRLLSLPNEASAKSTLQTLFDYTCRRMMS

SEQ ID NO: 1991 - protein, 703 aa, Arabidopsis thaliana
MLLSALLTSVGINLGLCFLFFTLYSILRKQPSNVTVYGPRLVKKDGKSQQSNEFNLERLLPTAGWVKRALEPTNDEILSNLGLDALVFIRVFVFSIRVFSFASVVGIFILLPVNYMGTEFEEFFDLPKKSMDNFSISNVNDGSNKLWIHFCAIYIFTAVVCSLLYYEHKYILTKRIAHLYSSKPQPQEFTVLVSGVPLVSGNSISETVENFFREYHSSSYLSHIVVHRTDKLKVLMNDAEKLYKKLTRVKSGSISRQKSRWGGFLGMFGNNVDVVDHYQKKLDKLEDDMRLKQSLLAGEEVPAAFVSFRTRHGAAIATNIQQGIDPTQWLTEAAPEPEDVHWPFFTASFVRRWISNVVVLVAFVALLILYIVPVVLVQGLANLHQLETWFPFLKGILNMKIVSQVITGYLPSLIFQLFLLIVPPIMLLLSSMQGFISHSQIEKSACIKLLIFTVWNSFFANVLSGSALYRVNVFLEPKTIPRVLAAAVPAQASFFVSYVVTSGWTGLSSEILRLVPLLWSFITKLFGKEDDKEFEVPSTPFCQEIPRILFFGLLGITYFFLSPLILPFLLVYYCLGYIIYRNQLLNVYAAKYETGGKFWPIVHSYTIFSLVLMHIIAVGLFGLKELPVASSLTIPLPVLTVLFSIYCQRRFLPNFKSYPTQCLVNKDKADEREQNMSEFYSELVVAYRDPALSASQDSRDISP

SEQ ID NO: 1992 - protein, 623 aa, Arabidopsis thaliana
MPAFYGGKLTTFEDDEKESEYGYVRKVSGPVVVADGMAGAAMYELVRVGHDNLIGEIIRLEGDSATIQVYEETAGLTVNDPVLRTHKPLSVELGPGILGNIFDGIQRPLKTIARISGDVYIPRGVSVPALDKDCLWEFQPNKFVEGDTITGGDLYATVFENTLMNHLVALPPDAMGKITYIAPAGQYSLKDTVIELEFQGIKKSYTMLQSWPVRTPRPVASKLAADTPLLTGQRVLDALFPSVLGGTCAIPGAFGCGKTVISQALSKYSNSDAVVYVGCGERGNEMAEVLMDFPQLTMTLPDGREESVMKRTTLVANTSNMPVAAREASIYTGITIAEYFRDMGYNVSMMADSTSRWAEALREISGRLAEMPADSGYPAYLAARLASFYERAGKVKCLGGPERNGSVTIVGAVSPPGGDFSDPVTSATLSIVQVFWGLDKKLAQRKHFPSVNWLISYSKYSTALESFYEKFDPDFINIRTKAREVLQREDDLNEIVQLVGKDALAEGDKITLETAKLLREDYLAQNAFTPYDKFCPFYKSVWMMRNIIHFYNLANQAVERAAGMDGQKITYTLIKHRLGDLFYRLVSQKFEDPAEGEDTLVEKFKKLYDDLNAGFRALEDETR

SEQ ID NO: 1993 - protein, 122 aa, Staphylococcus epidermidis
MANQEQIIEAIKEMSVLELNDLVKAIEEEFGVTAAAPVAAAGAAGGGDAAAEKTEFDVELTSAGSSKIKVVKAVKEATGLGLKDAKELVDGAPKVIKEAMPKEDAEKLKEQLEEVGASVELK

SEQ ID NO: 1994 - protein, 414 aa, Staphylococcus epidermidis
MNKNNRVVITGIGALSPIGNDAKTTWDNALKGVNGIDKITRIDTDDYNVHLAGELKDFNIEDHIDRKEARRMDRFTQYAVVAAREAVKDAQLNINEKNADRIGVWIGSGIGGMETFEVAHTTLVERGPRRVSPFFVPMLIPDMATGQVSIDLGAKGPNGSTVTACATGTNSIGEAFKIIQRGDADAMVTGGTEAPITHMAIAGFSASRALSTNNDPETACRPFQEGRDGFVMGEGAGIVVLESLDSAKERGAEIYAEVVGYGSSGDAHHITAPAPEGEGGSRAMQAALDDAGIKAQDVQYLNAHGTSTPVGDLYEVQAIKNTFGDAAKSLKVSSTKSMTGHLLGATGGIEAIFSALSIRDSKVAPTIHAITPDEECDLDIVPNVAQDLDITYAMSNSLGFGGHNAVLVFKKFED

SEQ ID NO: 1995 - protein, 609 aa, Staphylococcus epidermidis
MGKVIGIDLGTTNSCVSILEGDEPKVIQNPEGARTTPSVVAFKNGETQVGEVAKRQAITNPNTVQSIKRHMGTDYKVDIEGKSYTPQELSAMILQNLKSTAENYLGDTVDKAVITVPAYFNDGERQATKDAGKIAGLEVERIINEPTAAALAYGLDKTETDQKVLVFDLGGGTFDVSILELGDGVFEVLSTAGDNKLGGDDFDQVIIDYLVSEFKKENGVDLSQDKMALQRLKDAAEKAKKDLSGVSQTQISLPFISAGENGPLHLEISLTRSKFEELADSLIKKTMEPTRQALKDAGLSTSEIDEVILVGGSTRIPAVQEAVKKEIGKEPHKGVNPDEVVAMGAAIQAGVITGDVKDVVLLDVTPLSLGIEIMGGRMNTLIERNTTIPTSKSQVYSTAADNQPAVDIHVLQGERPMASDNKTLGRFQLTDIPPAPRGVPQIEVTFDIDKNGIVNVTAKDLGTNKEQNITIQSSSSLSDEEIDRMVKDAEENAEADKKRREEVDLRNEADSLVFQVEKTVKDLGENISDEDKKNAEEKKDALKTALEGEDIDDIKAKKEELEKVIQELSAKVYEQAQQAQQQAQEEQGSQDSTVEDADFKEVKDDEDKK

SEQ ID NO: 1996 - protein, 420 aa, Staphylococcus epidermidis
MFKFNEDEENLKCSFCGKDQDQVKKLVAGSGVYICNECIELCSEIVEEELAQNTSEGFTELPTPKEIMDHLNEYVIGQEKAKKSLAVAVYNHYKRIQQLGPNEDDVELQKSNIALIGPTGSGKTLLAQTLAKTLNVPFAIADATSLTEAGYVGDDVENILLRLIQAADFDIDKAEKGIIYVDEIDKIARKSENTSITRDVSGEGVQQALLKILEGTTASVPPQGGRKHPNQELIQIDTTNILFILGGAFDGIDEVIKRRLGEKVIGFASNEADKYDEEALLEQIRPEDLQSYGLIPEFIGRVPIVANLETLDVAALKNILTQPKNALVKQYTKMLELDNVELEFSEEALSAISEKAIERKTGARGLRSIIEEALIDIMYDVPSSENVSKVVITEQTINEEIEPELYDDEGNLINKNKTSA

SEQ ID NO: 1997 - protein, 585 aa, Staphylococcus epidermidis
MRKTKIVCTIGPASESEEMLEKLMNAGMNVARLNFSHGSHEEHKARIDTIRKVAKRLNKTIGLLLDTKGPEIRTHNMKDGLIVLEKGKEVIVSMNEVEGTPEKFSVTYENLINDVNIGSYILLDDGLVELQVKEINKDKGEVKCDILNTGELKNKKGVNLPGVKVNLPGITDKDADDIRFGIKENVDFIAASFVRRPSDVLDIRQILEEEKAEITIFPKIENQEGIDNIEEILEVSDGLMVARGDMGVEIPPESVPMVQKDLIRKCNKLGKPVITATQMLDSMQRNPRATRAEASDVANAIYDGTDAVMLSGETAAGQYPEEAVKTMRNIAVSAEAAQDYKKLLSDRTKLVETSLVNAIGVSVAHTALNLNVKAIVAATESGSTARTISKYRPHSDIIAVTPSEKTARQCAIVWGVNPVVKEGRKTTDALLNNAVATAVETGRVSNGDLIIITAGVPTGEKGTTNMMKIHLVGDEIAKGQGVGRGSVVGHAIVADSASDLEGKDLSDKVIITNSVDETLVPYVEKAIGLITEENGITSPSAIIGLEKGIPTVVGVEQATKEIKNDMLVTLDASQGKVFEGYANVL

SEQ ID NO: 1998 - protein, 633 aa, Bradyrhizobium japonicum
MGKVIGIDLGTTNSCVAVMDGKNAKVIENSEGMRTTPSIVAVTDDGERLVGQPAKRQAVTNPERTFFAVKRLIGRRYDDPMVEKDKKLVPYKIVKASNGDAWVEADGQTYSPSQVSAFILQKMKETAEAHLGQKVDQAVITVPAYFNDAQRQATKDAGKIAGLEVLRIINEPTAAALAYGLDKTKTGTIAVYDLGGGTFDISILEIGDGVFEVKSTNGDTFLGGEDFDMRLVGYLADEFQKEQGINLRNDKLALQRLKEAAEKAKIELSSTTQTEINLPFITADQTGPKHLTMKLTRAKFEALVDDLIQKTVEPCRKALKDAGVTAGEIGEVVLVGGMSRMPKVQEVVKQLFGKEPHKGVNPDEVVAIGAAIQAGVLQGDVKDVLLLDVTPLSLGIETLGGVFTRIIDRNTTIPTKKSQVFSTAEDNQNAVTIRVFQGEREMAADNKMLGQFDLMGIPPAPRGMPQIEVTFDIDANGIVNVSAKDKATGKEQQIRIQASGGLSEADIEKMVKDAEANAEADKKRREAVTAKNEADGLVHSTEKALAEHGSKVAETERRAIEDAVSDLKEALKGDDAEAIKAKTQTLAQASMKLGEAMYKQQAEADAKKDAAKDDVVDAEFTEVDDDKNNKKSA

SEQ ID NO: 1999 - protein, 345 aa, Bradyrhizobium japonicum
MTGQLRLDDHLQRYSETAPHALAVATAVDAIAAAAIEIADLIGAGDLADASGLTTGRNSDGDVQRDLDVQADAILRRCLGKLSIAALASEEMREPQIGDRAARICVAIDPLDGSSNIDINMTVGTIFSILPAPDDLALAFHQRGSAQFAAGFVTYGPQTSLVLTLGDGVDIFTLDRKAGCFRLARSAIQISEAGEEFAINASNRRHWDPPVRAFIDECLAGVEGPANHDFNMRWVGSLVAEAYRILTRGGVFLYPSDARPGYGDGRLRLTYEAHPMAYIIEQAGGSASTGRERILDLSAQSLHQRVPLIMGSSNEVRRVEELHCDPLLVASISAPLFARRGFFRL

SEQ ID NO: 2000 - protein, 421 aa, Bradyrhizobium japonicum
MRRVVVTGLGMVSPLGCGVEPTWKRILNGESGARRIESFDVSDLQTKIACTVVRGDGSNDTFNPDKWMEPKDQRKVDDFIIFGMAAAGQALDDANWHPETEEDKCATGTMIGSGIGGLNGIAETAILLKERGPRRVSPFFIPGRLINLASGYVSIAHGLKGPNHSVVTACSTGAHAVGDAARLIALGDADVMVAGGAESPISRIGIAGFNAARALSTGFNDTPEKASRPYDKDRDGFVMGEGAGVLVLEELEHARRRGAKIYAEVIGYGLSGDAYHITSPSPDGDGGFRSMQAALKRAGLTASDLDYINAHGTSTPLGDEIELGAVERLLGNAASKVAMSSTKSSTGHLLGAAGAIEAIFAILAIRDNVVPPTINLDNPSVETTIDLVPHTAKKREVNVALSNSFGFGGTNASVIVRRLAN

SEQ ID NO: 2001 - protein, 125 aa, Bradyrhizobium japonicum
MADLQKIVDDLSSLTVLEAAELAKLLEEKWGVSAAAAVAVAGPAGGGAAAAPAEEKTEFTVVLASAGEKKIEVIKEVRAITGLGLKEAKDLVEGAPKPVKEGVNKDEAEKIKVQLEKAGAKVELK

SEQ ID NO: 2002 - protein, 645 aa, Leptospira interrogans
MSKEKIIGIDLGTTNSVVSVMEGGDPVVIQNSEGARTTPSIVAFTAKGETLIGQFAKNQAITNAVNTIRSAKRFIGRRLNECESEMKHVSYKVIRSGNEGVKFETSAGEFTPQEISARVLMKMKQTAEDYLGQKVTKAVITVPAYFNDEQRQATKDAGRIAGLEVERIINEPTAAALAYGFDKKNVNSKIAVYDLGGGTFDISILELADGVFEVKSTNGDTHLGGDDFDMAIMEWMISEFKNQTGIDISADKNTVQRLKEAAEKAKIELSGTMSTQINLPFITADASGPKHLDMTLTRAKFDQLTKSLVDRTRIPCENALRDAGLKASDINEVILVGGSIRIPAVQELVKQVFGKEPNKSVNPDEVVAIGAAIQGGVLAGEVSDVLLLDVTPLSLGIETLGGVMTKLIERNTTIPTKKSQVFSTAADNQSAVSIHVLQGEREMASANRTLGRFDLIGIPPAPRGVPQIEVTFDIDANGIVHVSAKDLGTGKEQKIRIESSSGLSEDEIQKMVKDAEAHAAADKAQREVIEAKNELDTLTYSLEKTVNEAGDKIGANEKQLATDEIKRAREAIESNDKARIESAKASISKIATDIASKVYSQSAPGAEQAAAGGPNGAGSNDQGNSTNNGEKVVDADYTVVDDEKK

SEQ ID NO: 2003 - protein, 517 aa, Sorghum bicolor
MQFSLASDANSGPHPIRRSCEGGGIDRLERLSIGGSKQEKALRNRCFGGRVAATTQCILTSDACPETLHFQTQSSRKSYADANHVSAIILGGGTGSQLFPLTSTRATPAVPVGGCYRLIDIPMSNCFNSGINKIFVMTQFNSTSLNRHIHRTYLGGEINFADGSVQVLADTQMPEEPDGWFQGTADSVRKFIWVLEDYYNHKSIEHIVILSGDQLYQMNYMELVQKHVEDNADITVSCAPVDESRASNNGLVKCDHTGRVLQFFEKPKGADLNSMRVDTNFLSYAIGDAQKYQYIASMGIYVFKKDALLDLLKSKYTQLHDFGSEILPRAVLEHNVQTCIFMGYWEDVGTIKSFFDANLALTEQPSKFDFYDPKTPFFTAPRYLPPTQLDKCKIKDASISDGCLLRECSIEHSVIGVCSRVSYGCELKDCVMMGADIYETEEEASKLLLAGEVPVGIGGNTKIRNCIIDINARIGKNVVITNSKGIQEADHPEEGYYIKSGIVVILKNATIKDGSVI

SEQ ID NO: 2004 - protein, 191 aa, Populus alba
RLVPDTVYLTVNYIDRYPSGNVMNRQRLQLLGVACMMIAAKYEEICAPQVEEFCYITDNTYFRDEVLEMESTVLNYLKFEMTAPTAKCFLRRFVRAAQGIIEAPSMQLECLANYIAELPLLEYSMLCYAPSLVAASAIFLAKYILLPSKRPWNSTLQHYTLYEPVDLSDCVKDPHRLCCGDHNSTLPAIRE

SEQ ID NO: 2005 - protein, 426 aa, Vibrio vulnificus
MTDKSKESGSGKLLYCSFCGKSQHEVRKLIAGPSVYICDECVDLCNDIIREEIKDVLPKRESEALPTPREIRAHLDDYVIGQDHAKKVLAVAVYNHYKRLRNGDTTSDGVELGKSNILLIGPTGSGKTLLAETLARFLDVPFTMADATTLTEAGYVGEDVENIIQKLLQKCDYDVAKAERGIVYIDEIDKISRKAENPSITRDVSGEGVQQALLKLVEGTIASVPPQGGRKHPQQEFLQVDTSKILFICGGAFAGLDKVIEQRVATGTGIGFGAEVRSKDESKTVGELFTQVEPEDLVKYGLIPEFIGRLPVTASLTELDEEALIQILCQPKNALTKQYAALFELEGADLEFREDALKAIAKKAMERKTGARGLRSILEGVLLETMYELPSMDDVSKVVIDESVINGESEPLLIYTNSDSQAAGAE

SEQ ID NO: 2006 - protein, 636 aa, Vibrio vulnificus
MGKIIGIDLGTTNSCVAVLDGDKPRVIENAEGERTTPSVIAYTDGETLVGQPAKRQAVTNPENTLFAIKRLIGRRFEDEEVQRDIEIMPYKIVKADNGDAWVEAKGQKMAAPQVSAEVLKKMKKTAEDFLGEEVTGAVITVPAYFNDAQRQATKDAGRIAGLEVKRIINEPTAAALAYGLDKQGGDRTIAVYDLGGGTFDISIIEIDEVEGEKTFEVLATNGDTHLGGEDFDNRLINYLVAEFKKDQGIDLKNDPLAMQRVKEAAEKAKIELSSTNQTDVNLPYITADATGPKHMNIKVTRAKLESLVEDLVQRSLEPLKVALADADLSVGDITDVILVGGQTRMPMVQAKVTEFFGKEPRRDVNPDEAVAVGAAVQGGVLAGDVKDVLLLDVTPLSLGIETMGGVMTKLVEKNTTIPTKANQVFSTAEDNQSAVTIHVLQGERKQAMYNKSLGQFNLEGINPAPRGMPQIEVTFDLDADGILHVSAKDKQTGKEQKITIQASGGLSDAEIEKMVQEAEANKEADKKFEELATARNQADQIIHGTRKQVEEAGEALPADEKAKIETAISELEEARKGEDKEAIEAKIQALMAAAQKLMEIAQQQAQAQQGSAEAGAQSQEDDVVDAEFEEVKDDKK

SEQ ID NO: 2007 - protein, 470 aa, Vibrio vulnificus
MKKTKIVCTIGPKTESVEKLTELVNSGMNVMRLNFSHGDYVEHGTRIANFRQVMENTGKQLAILLDTKGPEIRTIKLENGDDVDLVAGQEFTFTTDTSVVGNKDIVAVTYPGFAADLSAGNTILVDDGLIEMEVIATTATEVKCKVLNNGALGENKGVNLPGVSVNLPALSEKDKNDLKFGCEQGVDFVAASFIRKASDVKEIREVLAANGGANIQIISKIENQEGVDNFDEILELSDGIMVARGDLGVEIPAEEVIFAQKMMIEKCNRARKVVITATQMLDSMIKNPRPTRAEAGDVANAIMDGTDAVMLSGETAKGKYPVEAVTIMAQIANRTDSVLKAELGSRLDSPRLRITEAVCKGAVDTAEKLAAPLIIVATEGGKSARSVRKYFPTANILALTTNKKTAAQLVLTKGVTPVVVDSIDNTDAFYVTGKELALESGLGSKGDIVVMVSGALVASGTTNTASVHVL

SEQ ID NO: 2008 - protein, 420 aa, Vibrio vulnificus
MSKRRVVVTGMGMLSPVGNTVAESWKSLLEGKSGIVNIEHFDATNFSTRFAGLVKDFNCEEYMSKKDARKMDLFIQYGIAAGIQALDDSGLEITDENAHRVGVAIGSGIGGLDLIEAGHTALVEKGPRKVSPFFVPSTIVNMVAGNLSIMRGMRGPNIAISTACTTGLHNIGHAARMIAYGDADAMVAGGAEKASTPLGMAGFGAAKALSTRNDEPQKASRPWDKDRDGFVLGDGAGIMVLEEYEHAKARGAKIYAELVGFGMSGDAYHMTSPSEDGSGGALAMEAAMRDAGIVGTQVGYVNAHGTSTPAGDVAEIKGVKRALGEEGAKQVKVSSTKSMTGHLLGAAGSVEAIITPCCRWLIRSFHQPLTWIIQKKVWISILFHILRRKWIWNTRSVTHSASVEQTAHSYLRKSNTHLGF

SEQ ID NO: 2009 - protein, 388 aa, Cypripedium parviflorum
LSSEWRQFWINPWNVESTAEAMSEAICMEWTQRSSCGMKSTIDIVSTHDVAYWSKSFMHDLERTCKDHFKRRCWGIGLGFGFRVVALDPNFRKLNIDAIVSAHERAKSRAILLDYDGTMMPQMPINKTPSAEIISIINTLCGDKKNVVFIVVVEEWCNLEKWFSPCRKLGLAAEHGYFTRWSRDESWEICSQSSDFEWMQIAEPVMKLYTESTDGSYIDKKESALVWHHHDADPDFGSAQAKEMLDHLESVLANEPVSVKSGQFIVEVKPQGVTKGIVVEKILSSMVNYNKQADFLLCIGDDRSHEDMFECISAILSKDLVAPNTTSVCFHKWDRNRAKARYYLDDTVEVTNMLGALADSSQPSSPISDVKLESLSFSEMAAKPNMST

SEQ ID NO: 2010 - protein, 428 aa, Brassica napus
ENSYTLSFLLVFFVLILLPPAFSINTLSSEESLTISSNRTLVSRGDVFELGFFKTTSSSRWYLGIWYKKFPYRTYVWVANRDNPLPNSIGTLKISNMNLVLLDHSNKSVWSTNLTRRNERTPVMAELLANGNFVMRDSNNNDASEFLWQSFDYPTDTLLPEMKLGYNLKKGLNRFLISWRSSDDPSSGDYSYKLEPRRLPEFYLLQGDVREHRSGPWNGIRFSGILEDQKLSYMEYNFTETSEEVAYTFRMTNNSFYSRLTLSSTGYFERLTWAPSSVVWNVFWSSPNHQCDMYKICGPYSYCDVTTSPVCNCIQGFRPKNRQQWDLRISLRGCIRRTRLSCSGDGFARMKYMKLPETTMAIVDRSIGVKECEKRCLSDCNCTAFANADVRNGGTGCVIWTGRLDDMRNYVPDHGQDLYVRLAAADLV

SEQ ID NO: 2011 - protein, 414 aa, Pseudomonas aeruginosa
MSRRRVVITGMGMLSPLGLDVPSSWEGILAGRSGIAPIEHMDLSAYSTRFGGSVKGFNVEEYLSAKEARKLDLFIQYGLAASFQAVRDSGLEVTDANRERIGVSMGSGIGGLTNIENNCRSLFEQGPRRISPFFVPGSIINMVSGFLSIHLGLQGPNYALTTACTTGTHSIGMAARNIAYGEADVMVAGGSEMAACGLGLGGFGAARALSTRNDEPTRASRPWDRDRDGFVLSDGSGALVLEELEHARARGARIYAELVGFGMSGDAFHMTAPPEDGAGAARCMKNALRDAGLDPRQVDYINAHGTSTPAGDIAEIAAVKSVFGEHAHALSMSSTKSMTGHLLGAAGAVEAIFSVLALRDQVAPPTINLDNPDEGCDLDLVAHEAKPRKIDVALSNSFGFGGTNGTLVFRRFAD

SEQ ID NO: 2012 - protein, 476 aa, Lycopersicon esculentum
MGDSTNFAAKHPVSINITESKLFDDDGRIKRSGSVWTASAHIITAVIGSGVLSLAWAVAQLGWIAGPIVMLLFSFVTYYTSSLLSDCYRSGDPLFGKRNYTYMDVVQANLSGLQVKICGWIQYVNLFGVAIGYTIASSISLMAVKRSDCFHKHGHKAPCLQPNTPYMIIFGVIEIIFSQIPDFDQIWWLSIVAAVMSFTYSTIGLGLGIAHVAETGKIGGSLTGVSIGTVTEMQKVWRTFQALGAIAFAYSYSLILIEIQDTIKSPPSEAKTMKNATIISVSVTTVFYMLCGCFGYAAFGDHAPDNLLTGFGFYDPYWLLDIANIAIFVHLVGAYQVYCQPLFAFIEKTAAEWYPNSKIITKNISVPIPGFKSYNIYLFRLVWRTIFVIISTIISMLLPFFSDIVGILGAFGFWPLTVYYPVEIYIVQKKIPKWSRKWFGLQILSVTCLIVSIAAAVGSFAGVVSDLKVYKPFKFT

SEQ ID NO: 2013 - protein, 471 aa, Lycopersicon esculentum
MADKPHQVFEVYGESKCFDDDGRIKRTGSVWTASAHIITAVIGSGVLSLAWATAQLGWVAGPTVLLLFSFVTYYTSALLSDCYRTGDPVTGKRNYTYMDAVRANLGGFQVKICGVIQYANLFGVAIGYTIASSISMVAVNRSNCFHKQGHHAACNVSSTPYMIMFGVMEIIFSQIPDFDQISWLSIVAAVMSFTYSTIGLGLGVAQVAETGKIEGSLTGISIGTEVTEMQKIWRSFQALGAIAFAYSYSLILIEIQDTLKSPPAEAKTMKRATLISVAVTTVFYMLCGCFGYAAFGDQSPGNLLTGFGFYNPYWLLDIANIAMVVHLVGAYQVYCQPLFAFVEKTAAEWYPDSKIITKEIDVPIPGFKPFKLNLFRLVWRAIFVIITTVISMLMPFFNDVVGILGAFGFWPLTVYFPVEMYIVQKRITKWSARWICLQILSGACLVISIAAAAGSFAGVVSDLKVYRPFQS

SEQ ID NO: 2014 - protein, 1183 aa, Oryza sativa
MHRLNQKLQRTAVGLRDWAKGICTEAKLQFHMALDVIQRLDVAQEHRDLSPQEMWLRAALKRKILGLASIERARKKQASRVTHIREGDANTKFFHLKINVRKRKNTIQRLRKDNGWAVTHGEKESTIHDHFASFMGRSGPRPNELNWEALDIMPVDLATLGKPFSEEEVHRAIKEMPADKAPGPDGFTGAFFKACWEIIKEDILLVFNSIFNLRCAHLNLINSANIVLIPKKDGAESVSDYRPISLIHSIAKIFSKLLALRLRPHMHALISVNQSAFIKGRSIHDNFLFVWNMARSYHRLRRAKLLFKLDITKAFDSVRWDYLLALLQQRGFPTRWVDWLGALLSTSTSQVLLNGSPGQRIKHGRGLRQGDPLSPLLFILAIDPLQRILSKATELGVISKLRGRTTRLRISMYADDAVIFINPTRGDVTAFADILHRFGTATGLVTNLQKSQVAAIRCDNIDLTEVLQGIPAMRANFPLKYLGLPLVLGRMRKTDLQPVFDKISGRVASWRGKNMEAAGRTTLVKSVLSAQPIYLLTALKVTKESLEQLDKQRRRFLWAGTSDITGGKCKVNWTKTCLPTSQGGLGVLNLDKFTRALRLRWLWHEWKDPTKPWAGLETPCDGLNKDLFAAATKVAVGDGNTARFWDAAWIDGQRPKDLMPLVYAISKNRGKSLRQGKEGDAWVNDLTFDAATPITISLVEQLVCLWETVRNVHLNSEEPNQIAWKFTANGHYTASSAYHAQCLGAPNSNLNSLIWKVWAPGKCKFHAWLIIQNRVWTSDRLATRGWQNNGHCPLCRSEPETGIHLVGKCRYTKRIWSLVASWTGYQQLEPNEWEEARYFRSFQAHPSKKRSVMGYKCSSCLQAVVLWQLLLPWTHIAVAAGAKSSSPAGKPKAAAPPVVAGPVSKVEDATRFQIYYGQSFKVVKNNWNGKSYLLMQLLGVLQNLKGITSDQIASQCVLQSYASGNVQLFNKTDAQMLTQFSAHFLSTTDEGCNFAAYVPSEEGTPLQIKANYLCLSKAAANLSTRFKPIVAWIEFTQGMWTFVSDGWIVQYVTDAGAEVVDATITNKRFNNSDPEDMDNFHAILCTVDVVIDQTYASDPAEYKLSTFLESINVDRDSCFSFVANRSIWRFDKRIGYSKKLDWFDGAISQPQLVLADLIEIFFPTGNYTTIYFRNLMKNKVTYQ

SEQ ID NO: 2015 - protein, 656 aa, Oryza sativa
MLTANVQSKCAANVCSRWAGFARTFSAKATGNEVIGIDLGTTNSCVSVMEGKNPKVIENSEGTRTTPSVVAFNQKGELLVGTPAKRQAVTNPQNTFFGTKRLIGRRFDDPQTQKEMKMVPYKIVKALNGDAWLETTDGKQYSPSQIGAFVLTKMKETAESYLGKSVSKAVITVPAYFNDAQRQATKDAGRIAGLDVQRIINEPTAAALSYGTNNKEGLIAVFDLGGGTFDVSILEISNGVFEVKATNGDTFLGGEDFDNTLLEFLVSEFKRTEGIDLSKDRLALQRLREAAEKAKIELSSTAQTEINLPFITADSSGAKHLNITLTRSKFESLVNSLIERTRDPCKSCLKDAGITTKDVDEVLLVGGMTRVPKVQEVVSEIFGKAPSKGVNPDEAVAMGAAIQGGILRGDVKDLLLLDVTPLSLGIETLGGIFTRLINRNTTVPTKKSQVFSTAADNQTQVGIKVLQGEREMAADNKLLGEFDLVGIPPAPRGMPQIEVTFDIDANGIVTVSAKDKATGKEQQITIRSSGGLSEAEIQKMVHEAELHSQKDQERKALIDIRNTADTTIYSIEKSLGEYRDKIPAEVASEIETAIADLRNEMASDDIEKIKSKIEAANKAVSKIGQHMSGGGSGGSQAGSQGGGDQAPEAEYEEVKK

SEQ ID NO: 2016 - protein, 465 aa, Xerophyta humilis
TTASLPWMTGTAVNPLFRAAYLAKSAKQRVTLVVPWLCESDQELVYPNSLTFGSPEEQEAYTRNWLEERIGFKADFRISFYPGKFSKERRSIIPVGDTSQFISAKDADIAILEEPEHLNWYHHGKRWTDKFNHVVGVVHTNYLEYIKREKYGAFQAFLVKHINNWVTRAYCHKVLRLSSATQNLPKSVICNVHGVNPKFLKIGERVAAERQNGHQAFSKGAYFLGKMVWAKGYRELIDLFSKHKNDLEGFKLDVYGNGEDSQEVQSTAKKLDLNLNFLKGRDHADDSLHGYKVFINPSVSDVYGTATAEALAMGKFVICADHPSNEFFMAFPNCLTYKTSKDFVARVKEALSSEPQPLTDEQRHNLSWEAATQRFMEYSELNKDCKIAVAQNSMQKTLRIKKSVSMPSLSEVVDGGLAFAHYCLTGNEVLRLATGAIPGTRDYDMPHCKDLHLLPPQVQHPVYGW

SEQ ID NO: 2017 - protein, 308 aa, Sorghum bicolor
MEINIVDKYEKLEKVGEGTYGKVYKAQDKATGQLVALKKTRLEMDEEGIPPTALREISLLNLLSHSIYVVRLLAVEQAAKNGKPVLYLVFEFLDTDLKKYLDVYRRGPAARPLPATLIKNFLYQLCKGVAHCHGHGVLHRDLKPQNLLVDKDKGILKIADLGLGRAFTVPMKSYTHEIVTLWYRAPEVLLGATHYSTGVDMWSVGCIFAEMARRQALFPGDSELQQLLHIFRLLGTPSEEQWPGVSELRDWHEFPQWKPQSLARVVPTLEPEGVDLLSKMLQLDPSNRISAIAAMEHPYFDSLDKSQF

SEQ ID NO: 2018 - protein, 313 aa, Rhizobium sp.
MTDIREWTSTVGLENELGEVLSGLANACATIARTLRTAPLAQLSGSAGSLNVQGEAQKPLDIISNEVFVNACRELAQISLAVSEEEEDPIPISATGSYAVVFDPLDGSSNLDVNVTVGSIFSVVSATTPKHILPGGRPQHIAGFASYGPSTDLTVLAKGRVARFTLDASDTWRLVELDMRLPDRFPEIAINAARADSWDDVIRGFVNDAFHGNEIRYNARWVASLVAETQRILSRGGLFLYPADSSGRGRLRLLYEARPIAAIVEAAGGRCSTGFMPILEVNAETLHDRVPLIFGGASQVEALEAAYRADKEN

SEQ ID NO: 2019 - protein, 254 aa, Oryza sativa
MCNYGGLGVPNLELMGIALRSRWTWLQRTSSSKPWQGLAIPGSQKERNFVAASTICQLRDGQTILFWEDSWLQEGCIRSFAPNIYDKIPPRVRRCRTVAEALTGRQWIKDIRGALGIQPILEYLKLWSLVQMVDLDPTTPDSIIWKWESSGQYSSKSAYKALFFGRVTFLSTPIWKSLAPPRCRFFLWLVAMNRCWTADRLRSRGLPHPDRCAIRRPNCLPVNEPSFHNWLCESQMKIGERHRRGFDTVVTLVA

SEQ ID NO: 2020 - protein, 623 aa, Lycopersicon esculentum
MPSIVGGPMTTFEDSEKESEYGYLRKVSGPVVVADGMGGAAMYELVRVGHDNLIGEIIRLEGDSATIQVYEETAGLMVNDPVLRTHKPLSVELGPGILGNIFDGIQRPLKTIAKRSGDVYIPRGVSVPALDKDILWEFQPKKIGEGDLLTGGDLYATVFENSLMEHRVALPPDAMGKITYIAPAGQYSLNDTVLELEFQGVKKQVTMLQTWPVRSPRPVASKLAADTPLLTGQRVLDALFPSVLGGTCAIPGAFGCGKTVISQALSKYSNSDTVVYVGCGERGNEMAEVLMDFPQLTMTLPDGREESVMKRTTLVANTSNMPVAAREASIYTGITIAEYFRDMGYNVSMMADSTSRWAEALREISGRLAEMPADSGYPAYLAARLASFYERAGKVKCLGGPERTGSVTIVGAVSPPGGDFSDPVTSATLGIVQVFWGLDKKLAQRKHFPSVNWLISYSKYSGALESFYEKFDPDFINIRTKAREVLQREDDLNEIVQLVGKDALAETDKITLETAKLLREDYLAQNAFTPYDKFCPFYKSVWMLRNIIHFYNLANQAVERGAGMDGQKITYTLIKHRLGDLFYRLVSQKFEDPAEGEDVLVGKFQKLHDDLVAGFRNLEDETR

SEQ ID NO: 2021 - protein, 623 aa, Lycopersicon esculentum
MPSLFGGPLTTFEDSEKESEYGYVRKVSGPVVVADGMAGAAMYELVRVGHDNLIGEIIRLEGDSATIQVYEETAGLMVNDPVLRTRKPLSVELGPGILGNIFDGIQRPLKTIAKRSGDVYIPRGVSVPALDKDILWEFEPKKIGEGDILTGGDLYANVFENSLMEHHVALPPDAMGKITYIAPAGHYSLKDTVLELEFQGVKKQFTMLQSWPVRTPRPVAAKLAADTPLLTGQRVLDALFPSVLGGTCAIPGAFGCGKTVISQALSKYSNSDTVVYVGCGERGNEMAEVLMDFPQLTMTLPDGREESVMKRTTLVANTSNMPVAAREASIYTGITIAEYFRDMGYNVSMMADSTSRWAEALREISGRLAEMPADSGYPAYLAARLASFYERAGKVKCLGGPERNGSVTIVGAVSPPGGDFSDPVTSATLGIVQVFWGLDKKLAQRKHFPSVNWLISYSKYSGALESFYEKFDPDFINIRTKAREVLQREDDLNEIVQLVGKDALAETDKITLETAKLLREDYLAQNAFTPYDKFCPFYKSVWMLRNIIHFYNLANQAVERGAGMDGQKMTYTLIKHRLGDLFYRLVSQKFEDPPEGEDALVAKFKKLHDDLTAGFRNLEDETR

SEQ ID NO: 2022 - protein, 428 aa, Buchnera aphidicola
MVDNSKNNTETLLCCSFCEKNQKEVKKLIAGLSAYICDECIKLCNNILEEENNNLSSYYDVKKKIPTPYEIFKHLDNYIIGQLHTKKVLSVAVYNHYKRLNHLNSKKNNNIELGKSNLLLIGPTGCGKTLLAETLAKFLDVPFSISDATTLTEAGYVGEDVENIIQRLLQKCNYNIKKAETGIIYIDEIDKISRKSENPSITRDVSGEGVQQALLKLIEGTLASVPMQGGRKHPQQEFLKVDTSKILFICGGAFLGLNKIIEKRTKLGTKIGFNAKVNKNLKICSKDALMQQVIPEDLIKFGLIPEFIGRLPILTILHELDKKMLVKILSEPKNALIKQYQTLFKLEDVELKICTKVIEYIAQKAMNQNTGARGLRSIIEMLLLDTMYRLPSMTNIKTIIIDESTIVNNNLTPILIYKKHDSKTTSGK

SEQ ID NO: 2023 - protein, 638 aa, Buchnera aphidicola
MSKIIGIDLGTTNSCIAIMDGNKARVLENSEGDRTTPSIIAYTNDNEILIGKPAKRQSITNPKNTLFAIKRLIGRKFTDNEVQRDIKIMPYKIIQSENGDAWINIKNKKLAPPQISAEILKKMKKTAEDYLGESIQEAVITVPAYFNDAQRQATKDAGRIAGLKVKRIINEPTAAALAYGLDKGKGNKTIAVYDLGGGTFDISIIEIDDVDKEKTFEVLATNGDTHLGGEDFDNRLINYLVEDFKKDQGTDLRNDSLAMQRLKESAEKAKIELSSTQQTDVNLPYITADSTGPKHLNIKVTRSKLESLVEDLITRSIEPLKIALKDAKLSISDIDDVILVGGQTRMPMVQKKVAEFFKKEPRKDVNPDEAVAVGAAVQGGVLSGEVKDVLLLDVTPLSLGIETMGGVMTTLISKNTTIPTKHSQIFSTAEDNQTAVTIHVLQGERKRSIDNKSLGQFNLDGIQPAPRGMAQIEVTFDIDSDGILHVSAKDKNTGKEQKITIKASSGLNETEIKKMILDAEQNSESDQKFEELVKVRNQGDQISHSTKKQLKDLEKTINVNDQKEINEALNKLDTALKGENKTKIEEKIQEVLKISTKLIEKNKPKQTSESSNSNSPSSSKPEENVVDAEFEEVKDQKK

SEQ ID NO: 2024 - protein, 426 aa, Xylella fastidiosa
MSEDRQSRSGDGNKILYCSFCGKSQREVRKLIAGPSVFICDECVELCNDIIREELEEKSQSARSSLPKPKEILEVLDQYVIGQQRAKRTLAVAVYNHYKRIESRHKNDDIELAKSNILLVGPTGSGKTLLAETLARLLNVPFTIADATTLTEAGYVGEDVENIIQKLLHKCDYDVEKAQHGIVYIDEIDKISRKSENPSITRDVSGEGVQQALLKLIEGTVASVPPQGGRKHPQQEFLQVDTKNILFICGGAFAGLDKVIQQRCNEVGGIGFGVKVKSSESKRDVGKVLAGVEPEDLIKFGLIPEFVGRLPVVATLDELDESALVKILTEPKNAITKQFKKLFEMENVELEFRQDALSAVARKALKRKTGARGLRTIVELVLLDTMYELPSQEGISKVVVDESVIENKSEPYLIYQTMPAKVASGE

SEQ ID NO: 2025 - protein, 638 aa, Xylella fastidiosa
MGKIIGIDLGTTNSCLAIIEGGKGRVIENSEGDRTTPSIVAYTKDGEVLVGAAAKRQAVTNPKNTFYAVKRLIGRKFGDAEVQKDLDLVPYKITQHDNGDAWVATADGKKLAPQEISAKVLEKMKKTAEDFLGEKVTEAVITVPAYFNDSQRQATKDAGRIAGLDVKRIINEPTAAALAYGLDKKGGDRKIAVYDLGGGTFDVSIIEIAEVDGEKQFEVLATNGDTFLGGEDFDKRVIDYLVDEFNKDQGIDLRKDPLALQRLKDAAERAKIELSSSQQTEVNLPYITADASGPKHLNIKLTRAKLEALVDDLVRKSIEPCRIALNDAGLRTSDVQEVILVGGQTRMPKVQQAVADFFGKEPRKDVNPDEAVALGAAIQGGVLAGDVKDVLLLDVTPLSLGIETMGGVFTKIIEKNTTIPTKASQVFSTAEDGQSAVTVHVLQGEREQARFNKSLAKFDLAGIEPAPRGQPQIEVSFDIDANGILHVSAKDKKTNKEQKVEVKAGSGLSDSEIQQMVADAEAHREEDKKFQELVQARNHADGLIHSTRSAIKEHGSKVGGELIGRVEASLAELEAAVKGDDKNQIEAKSKTLEEVAQSLHMAATAEQQSGSTGAGAGASAKVDDVVDAEFTEVKADKK

SEQ ID NO: 2026 - protein, 411 aa, Xylella fastidiosa
MNRRVVVTGMGMVSPLGNDLTTSWDGIVHGRSGIAPIVQIDASKFPTQIAGEIKGFDPTKFVSAKDAKKMDSFIYYGIGAAFMALDDAGLEINEINAERVGALIGSGIGGVFGIEEQTIKLYEGGARKISPFYVPATIINMLPGQLSVLKGLKGPTFSAVSACATSNHSIGMAMRMIQYGDADVMLAGGSERASSPTAIGGFCAMRAMSTRNDDPTGASRPWDKGRDGFVLGDGAGILVLEEYEYAKARGARIYAELAGFGATSDAFHMTMPVEDGEGAARCMRIALQDARVTPEQIDYLNAHGTSTPLGDLCETNAIKTVLGGHAYKVMVSSTKSMTGHLLGAAGGVEAIFSVMALHTGIVPPTINLEEPDEGCDLDYVPHVAREAKLDVVISNGFGFGGTNGTLVFKRI

SEQ ID NO: 2027 - protein, 488 aa, Xylella fastidiosa
MSERQRRTRILATLGPATDPPGVLDALFKAGVNVVRLNFSHGDVSDQARRVAEVRAAAAHVGVEIGILADLPGPKIRIGRFTGGKVRLVAGARFDLLADSNASLGDTTQVGVSYLGLPQDVAAGDVLLLDDGLMQLQVVQVQGARIVTTVLNDGVLSDRKGLNKQGGGLSLGALTDRDRELIGIVARMGIDFIAVSFCRHAEEMHEARRIARECGCDAALVSKIERAEAIVNLAEIVAASDVVMVARGDLGVEIGDAQLPGLQKKIIKEALLQNKVVITATQMLQSMVESPIPTRAEVLDVANAVIDGTDAVMLSAETATGDYPVKAVEAMARICLGAEHQFEFDTDYEMAQRNLQRADHAIAMATMFLSEHICLGGVVALTESGTTPRFLSRFRSHVPIYAFTRHEDVRRRMVLMRGVFPMRFDSRGLTPREAARATIRLLVECGCMSPGDRVVFTSGEHMETLGATNTLRLLEVGADGCVSGLWEL

SEQ ID NO: 2028 - protein, 466 aa, Arabidopsis thaliana
MDVPRPAFKCFDDDGRLKRSGTVWTASAHIITAVIGSGVLSLAWAIGQLGWIAGPTVMLLFSFVTYYSSTLLSDCYRTGDPVSGKRNYTYMDAVRSILGGFRFKICGLIQYLNLFGITVGYTIAASISMMAIKRSNCFHESGGKNPCHMSSNPYMIMFGVTEILLSQIKDFDQIWWLSIVAAIMSFTYSAIGLALGIIQVAANGVVKGSLTGISIGAVTQTQKIWRTFQALGDIAFAYSYSVVLIEIQDTVRSPPAESKTMKIATRISIAVTTTFYMLCGCMGYAAFGDKAPGNLLTGFGFYNPFWLLDVANAAIVIHLVGAYQVFAQPIFAFIEKQAAASFPDSDLVTKEYEIRIPGFRSPYKVNVFRAVYRSGFVVLTTVISMLMPFFNDVVGILGALGFWPLTVYFPVEMYIRQRKVERWSMKWVCLQMLSCGCLMITLVAGVGSIAGVMLDLKVYKPFKTTY

SEQ ID NO: 2029 - protein, 347 aa, Oryza sativa
MDDNSIQQSLLADNPNVLQRKPSEGVNRFRRCRSTPSTDPLQGPPEKGSSVKAKELFKEMRPSFRLVGLLLFIYLLVGVLAFYAVMDEISGKRTNRVLDALYFCVVTMTTVGYGDLVPNNDTTKLLACAFVFMGMAVVALFVSKVADYLVEKQEVLFFKALHTNLKGGETKMLRAIETNRIKYKFYTNALLLVLSIISGTVFLWKVEKLSLVDSFYCVCATITTLGYGDKSFSSKLGRVFAVFWIITSTIIMAQFFMYLAEIYTERRQKMLANWVLTRKMTKMDLEAADLDDDRQVGAAEFVVYKLKELGKINQEEISSFLEEFEKLDVDHSGTLSPYDLTLAQSAQ

SEQ ID NO: 2030 - protein, 431 aa, Clostridium tetani
MDMAKNDDKKQLKCSFCGKKQDQVKRLVAGPGVYICDECIELCSEIITDELEEDINTDMSSLPKPSEIKSYLDDYVIGQDDAKKALSVAVYNHYKRINLNNVNDDVELQKSNILLLGPTGSGKTLLAQTMAKFLNVPFAIADATTLTEAGYVGEDVENILLKLIQNADYDIEKAERGIIYIDEIDKIARKSENPSITRDVSGEGVQQSLLKILEGTIASVPPQGGRKHPHQEFIQLNTTNILFICGGAFDGVDKLIERRTRNSSLGFGADIKSKRDENVGELLKKIMPEDLLKFGLIPEFIGRLPITVTLSALDRDALVEILTEPKNALVKQYKKLFEMDNVHLEFKEEALKAIAEEAIRRSTGARGLRSIIEEIMKDIMFEIPSDESISKVIINEETVSNKNPELIEAEGGKRPPIKIKKPRAKKGNETA

SEQ ID NO: 2031 - protein, 584 aa, Clostridium tetani
MQKTKMVFTIGPASDSEEVLSELIKAGMSASRHNFSHGTHEEHKIRIDLIRKLSDKFNKNIAVILDTKGPEIRTGDFKDKTVQLKEGNKFTIYCGEEILGDETKCSITYNDLHNDVKTGDSILIDDGLVGLEVEEVEGSKVHCVVKNSGAVSNHKGVNVPGVDVSLPSLTEKDKSDLEFGCKVGVDFIAASFIRKGSDVLEIRKVLEENGGTDIQIFSKIENQQGVENIDEIIKFSDGIMVARGDMGVELQMEQVPIIQKMIIEKCNKAGKPVITATQMLDSMIRNPRPTRAEVSDVANAIFDGTDAVMLSGETAGGKYPIEAAKAMAKIARTAEETMDYDEIFNRKREARVLSVANAISIATCTTASELNASAILTATQTGYTARAVSKYRPACPIIAITPSKNVARKLALSWGVFPILTTKFTSTDALIENSVDIALTAEYIRKGDLVVIAAGIPVSYSGTTNMLKVHVVGDILVQGRGAGNSAGYGIAKVVNSTEEAERVIESGDILVVKDADIDYVSILNRVSGVITERGGLTSHLAIECITNEIPFICGAGGATDVLKSGYFITMDVKRGIVYNGRITI

SEQ ID NO: 2032 - protein, 487 aa, Silene latifolia
MSTQAHRNRLLGTENGNGGGGVKVVNNPKLTKKRPPLSNLTNHPRPSLVPSAITKSTKAKRDSSTGVRSTSFPAENPSATLNSKPSAVVPLKTAFTRSNVLVSCKASLPNGKGEQSHITRHPASCTMDTTPTPEDAQSVSMDESMSTCDSLKSPEVEYMDENDVAALCSIERKTSKNLYISDDMETTGSFCKREIVSAMEIDKVVDVDDNHMDPQFCSTIACDIYKHLRESETQKRPSTDFMEQTQKDINASMRAILVDWLVEVAEEYRLVPDTLYLTVNYIDRYLSGNAMNRQRLQLLGVACMMIAAKYEEICAPQVEEFCYITDNTYFKEEVLQMESGVLNFLKFEMTAPTTKNFLRRFVRAAQVMNEVPAFQLECLANYVAELSLLEYSMLKYAPSLIAASSVFLAKYMLTSSRPWNATLRHYTLYEASDLEECVKALHQLCLNSHISSLPAIREKYSHHKYKSVAKKHCPSSIPAEYFQNSSC

SEQ ID NO: 2033 - protein, 592 aa, Clostridium tetani
MDLKTGRVVKVSGPLVVAEGMEEANLFDVVRVGDERLIGEIIEMREDKASIQVYEETSGLGPGAPVVTTGAPLSVELGPGLIEAMFDGIQRPLDAIEAKAGDFITRGIDVPSLSREKVWHFNPTKKAGDKVETGDILGLVQETSVIEHRIMVPPGIKGEIISLNEGDYTVIDKIGEIKTDKGIEDLTLMQKWPVRRGRPYKRKLNPSAPMVTGQRVVDTFFPVTKGGTACVPGPFGSGKTVVQHQLAKWADAQIVVYIGCGERGNEMTDVLNEFPELKDPKTGESLMKRTVLIANTSNMPVAAREASIYTGITIGEYFRDMGYSIALMADSTSRWAEALREMSGRLEEMPGEEGYPAYLGSRLAEFYERAGNVICLGQDGREGALTAIGAVSPPGGDLSEPVTQATLRIVKVFWGLDSQLAYRRHFPAINWLNSYSLYLDKVGPWMNENVAEDWVELRQKAMALLQEEANLQEIARLVGIDALSEEDRLKLEVAKSLREDYLQQNAFHDVDTYAPLNKQYRMLKAVLQFGDEARKALESGVYLKDILNLPVRDKIARAKYIDEKDILSIDEISKELTKDIEDLISKGGILDA

SEQ ID NO: 2034 - protein, 494 aa, Geobacillus stearothermophilus
MKRKTKIVCTIGPASESVDKLVQLMEAGMNVARLNFSHGDHEEHGRRIANIREAAKRTGRTVAILLDTKGPEIRTHNMENGAIELKEGSKLVISMSEVLGTPEKISVTYPSLIDDVSVGAKILLDDGLISLEVNAVDKQAGEIVTTVLNGGVLKNKKGVNVPGVKVNLPGITEKDRADILFGIRQGIDFIAASFVRRASDVLEIRELLEAHDALHIQIIAKIENEEGVANIDEILEAADGLMVARGDLGVEIPAEEVPLIQKLLIKKCNMLGKPVITATQMLDSMQRNPRPTRAEASDVANAIFDGTDAVMLSGETAAGQYPVEAVKTMHQIALRTEQALEHRDILSQRTKESQTTITDAIGQSVAHTALNLDVAAIVTPTVSGKTPQMVAKYRPKAPIIAVTSNEAVSRRLALVWGVYTKEAPHVNTTDEMLDVAVDAAVRSGLVKHGDLVVITAGVPVGETGSTNLMKVHVISDLLAKGQGIGASRRSARPL

SEQ ID NO: 2035 - protein, 627 aa, Rickettsia sibirica
MGKVIGIDLGTTNSCVAVMEGKEPKVIENAEGERTTPSIIAFANGEKLVGQSAKRQAVTNPRNTIYAVKRLIGRNFIDPMVRKDQGIVPYNIVKADNGDAWVEADNNKYSPSQISAFILQKMKETAENYLGDKVTQAVITVPAYFNDAQRQATKDAGKIAGLEVLRIINEPTAAALAYGFEKSASKTIAVYDLGGGTFDVSILEIADGVFEVKSTNGDTFLGGEDFDTRILNHLIDVFKKENGIDLSKDPLALQRLKEAAEKAKKELSSAVTTDINLPYITADSSGPKHLNIKFTRAELEKLVDDLIEKTIEPCRKALQDAGFKASDIQEVILVGGMTRMPKVQEAVKKFFGREPHKGVNPDEVVALGAAIQGGVLNKEVTDILLLDVTPLSLGIETLGGVFTRLIDRNTTIPTKKSQIFSTADDNQHAVTIRVFQGEREMAKDNKLLGQFNLEGIPLAPRGLPQIEVTFDIDANGIVHVSAKDKASGKEQKVTIQASGGLSDAEIEQMVKDAEQNADEDKKRKELIEAKNAADSLVYSTEKTLTEYGDKLSSDDKGAVEEALAALKAVLESEDTALIKEKTESLTAASMKIGEAMYKAQSESQPAAESATNDEKIVDADFQDVEKK

SEQ ID NO: 2036 - protein, 500 aa, Anaplasma centrale
MAAERIIGIDLGTTNSCVAVMEAGTAKVIENSEGSRTTPSVVAFTENEQLVGELAKRQANINALNTIYASKRIIGRRYDDMRDVKCPYEVFPAKNGDAWIRARGAEYSPVQIGAFVLEKIKETAERYFGAPVKKAVITVPAYFNDAQRQATKDAGAIAGLDVVRIINEPTAAALAYGLDKGDKQRTIVVYDLGGGTFDVSVLEIAEGVFEVKATNGDTKLGGEDFDNAVMEHMMGSFKQETGIDLHNDPMAVQRIKEAAEKAKIELSSRLETDITLPFISSDSTGAKHLRLKLTRAKFESLVSELIERTIEPCKKALDDAGIKDTSKIDEVVLVGGMTRVPKVVQRVKDFFGGKEPCKGVNPDEVVAIGAAIQGGILTGDVRDVLLLDVAPLSLGIETLGGVFTPLIERNTTIPTKKSQVFSTAEDGQTAVTIKVYQGERKMAIDNKLLGQFSLEGIPSAPRGVPQIEVTFDIDANGIVHVSAKDKASGKEQTIKIQSSG

SEQ ID NO: 2037 - protein, 439 aa, Nostoc sp.
LEQYKTWQQQIESWQDPILNRPDLPDWFKMALFNELYDLTSGGTLWSAATPCDPIGQFAVLECLDYRWYESLDVRLYGSFGLLQLFPELEKAVMRAFARAIPQGDDTPRVIGYYYTIGAESPIAVRKTPGATPHDLGAPNEHVWEKTNYTSYQDCNLWKDLGCDFVLQVYRDFLLTGADDVQFLRDCWDAIVETLDYVKTFDLDGDGIPENSGAPDQTFDDWRLQGVSAYCGGLWLAALAAAIAISDILLQNHQDSATKGHLLYQKSTYETWLTKSLPIYQEKLWNGKYYRLDSESGSDVVMADQLCGQFYANLLELPDIVPSDRAISALQTVYDACFLKFYDGQFGAANGVRPDGSPENPKATHPLEVWTGINFGLAAFLVQMGMKDEGFRLTQAVVEQIYNNGLQFRTPEAITAAGTFRASTYLRPMAIWAIYLMIG

SEQ ID NO: 2038 - protein, 517 aa, Petunia x
MAPDDRGMKNGGASTGRSNGAGSSRQVLKKGPWTAAEDSILMEYVKKHGEGNWNAVQRNSGLMRCGKSCRLRWANHLRPNLKKGAFTVEEERIIIELHAKLGNKWARMAAQLPGRTDNEIKNYWNTRLKRRQRAGLPIYPQELQQQNQHENNNQPHSLLSSSYDPQNSTNYNSPSLSLLDIFNPSTMKPSITQQFPINTPSLCLPSTNNNNIFRNTPKGLSLTLPSSMRNSQFSSLPNNNFTQGLSSNSIQLPPFQHNYPNFNINRPFTGISSNPNGLICGMGINTINYPSGQSSMPVTASSSENTGSDFGSSDNANNYANTNGLSRGNSGLLEDLLEESQTLNRPGMKIEDNFLDLKEDQEADYKGKSMLWEDYGLVEDAEEAILTEESAYSFAHGVDHVAQNKNSESSSPHSPPNSSSGIFMKKEDSFHGTNQADDDIMCLLDNFPLAVPVPEWYEDEDDKNNCNGQSSNVTNCDHIAENQAEDSKSPALTLNSGTRNHDWEFGGCCWNNMPSFC

SEQ ID NO: 2039 - protein, 619 aa, Schizosaccharomyces pombe
MAGGIELAKKAIRSLKNYDEHENRYGSIFSVSGPVVVAANMLGCSMYELVRVGHEELVGEVIRIHQDKCTIQVYEETSGLTVGDPVQRTGKPLSVELGPGLAETIYDGIQRPLKQIFDKSQSIYIPRGINTESLNREHKWDFTPNKDLRIGDHVSGGDVFGSVFENSLFNDHKIMLPPRARGTVTYIAEAGSYHVDEKLLEVEFNGKKHSFSMLHTWPVRAARPVADNLTANQPLLTGQRVLDALYPCVQGGTTAIPGAFGCGKTVISQSLSKYSNSDLIVYVGCGERGNEMAEVLMDFPELTIDINGKPEPIMKRTTLVANTSNMPVAAREASIYTGITLAEYYRDQGKNVSMMADSTSRWAEALREISGRLAEMPADSGYPAYLGAKLASFYERAGRARCLGSPDREGTVSIVGAVSPPGGDFSDPVTSATLGIVQVFWGLDKKLAQRKHFPSINTSLSYSKYINALQPWYEERVPGFNTLRDQIKQIIQQEDSMLEIIQLVGKSALSETDKVTLDIAGIIKNDFLQQNGYSDYDRCCPLYKTYHMMRNMIAYYTKAKSAVETGSVPWSKIKESTSDIFYELTSMKFENPNEGEKEIVEHYETLHKKIEDKFHTLTE

SEQ ID NO: 2040 - protein, 203 aa, Oryza sativa
MAAAAQRLLAASTKIVGVGRNFVAHAKELGNPVPKEPVLFLKPTSSFLHAGVAGAAIEVPEPVESLHHEVELAVVISQRARDVPEASAMDFVGGYALALDMTARELQSAAKSAGLPWTLGKAQDTFTPISAVIPKSDVANPDDLELWLKVDDELRQKGSTSDMIFKIPSLISYISSIMTLMEGDVILTGKSHFWRTVCCALEL

SEQ ID NO: 2041 - protein, 405 aa, Oryza sativa
MFFHLHARARRRKNFITRLQDGDQLAVSHDELQELASSHFGAILGTSVERDFALDLHSLGLCPAHLGGLDNPFSEEEVWAVVKALPSDKAPGPDGFTGRFYKTCWSVIKPEVMAALNSLFLANGRGFSSLNDTLISLLPKKDEAVDVKDFRPISPIHSFGKLFSKIPASRLSPHLGELVAPNQSASSKADPFHDNFRYVQLAARALHAKHIPRLLLKVDIAKAFDTGDPLSPMLFILVMDVLNTMLRKASESGGFLPLNDHASLYADDLVLFLSPSVLSSIPVHVSMVIGLPAWMIKAINKKRRAFLWTGNPYWDGLKAPAERAVTDMFQASTFFVPGDGESILFWSDQWIGGRSVASLAPDLLFVVPPRLRGSRTVSSGLANNAWISDIRGALTVPGISQFLLV

SEQ ID NO: 2042 - protein, 564 aa, Arabidopsis thaliana
ESTLGRHLSRRLVQAGVTDVFSVPGDFNLTLLDHLIAEPELNNIGCCNELNAGYAADGYARSRGVGACVVTFTVGGLSVLNAIAGAYSENLPVICIVGGPNSNDFGTNRILHHTIGLPDFSQELRCFQTVTCYQAVVNNLEDAHEQIDKAIATALKESKPVYISISCNLAATPHPTFARDPVPFDLTPRMSNTMGLEAAVEATLEFLNKAVKPVMVGGPKLRVAKASEAFLELADASGYPLAVMPSTKGLVPENHPHFIGTYWGAVSTPFCSEIVESADAYIFAGPIFNDYSSVGYSLLLKKEKAIIVHPDRVVVANGPTFGCVLMSDFFRELAKRVKRNETAYENYERIFVPEGKPLKCKPGEPLRVNAMFQHIQKMLSSETAVIAETGDSWFNCQKLKLPKGCGYEFQMQYGSIGWSVGATLGYAQATPEKRVLSFIGDGSFQVTAQDISTMIRNGQKAIIFLINNGGYTTEVEIHDGPYNVIKNWNYTGLVDAIHNGEGKCWTTKVRYEEELVEAIKTATTEKKDSLCFIEVIVHKDDTSKELLEWGSRVSAANGRPPNPQ

SEQ ID NO: 2043 - protein, 876 aa, Arabidopsis thaliana
MNPFSSGTRLRDMIRAIRACKTAAEERAVVRKECADIRALINEDDPHDRHRNLAKLMFIHMLGYPTHFGQMECLKLIASPGFPEKRIGYLGLMLLLDERQEVLMLVTNSLKQDLNHSNQYVVGLALCALGNICSAEMARDLAPEVERLIQFRDPNIRKKAALCSTRIIRKVPDLAENFVNAAASLLKEKHHGVLITGVQLCYELCTINDEALEYFRTKCTEGLIKTLRDITNSAYQPEYDVAGITDPFLHIRLLRLLRVLGQGDADASDLMTDILAQVATKTESNKNAGNAVLYECVETIMAIEDTNSLRVLAINILGRFLSNRDNNIRYVALNMLMKAITFDDQAVQRHRVTILECVKDPDASIRKRALELVTLLVNENNVTQLTKELIDYLEISDEDFKEDLSAKICFIVEKFSPEKLWYIDQMLKVLCEAGKFVKDDVWHALIVVISNASELHGYTVRALYKSVLTYSEQETLVRVAVWCIGEYGDLLVNNVGMLGIEDPITVTESDAVDVIEDAITRHNSDSTTKAMALVALLKLSSRFPSISERIKDIIVKQKGSLLLEMQQRAIEYNSIVDRHKNIRSSLVDRMPVLDEATFNVRRAGSFPASVSTMAKPSVSLQNGVEKLPVAPLVDLLDLDSDDIMAAPSPSGTDFLQDLLGVDLGSSSAQYGATQAPKAGTDLLLDILSIGTPSPAQNSTSSIGLLSIADVNNNPSIALDTLSSPAPPHVATTSSTGMFDLLDGLSPSPSKEATNGPAYAPIVAYESSSLKIEFTFSKTPGNLQTTNVQATFTNLSPNTFTDFIFQAAVPKFLQLHLDPASSNTLLASGSGAITQNLRVTNSQQGKKSLVMRMRIGYKLNGKDVLEEGQVSNFPRGL

SEQ ID NO: 2044 - protein, 184 aa, Brassica napus
PYMAVFGIIQIFFSQIPNFHKLSFLSLMAAVMSFAYASIGIALAIAPVAGGKVGKTNMTGTVVGVDVTAAQKIWRSFQAVGDIAFAYAYATVLIEIQDTLRSSPAENKAMKRASFVGVSTTTFFYILCGCLGYAAFGNKAPGDFLTDFGFYEPFWLIDFANACIAVHLIGAYQVFAQPIFQFVE

SEQ ID NO: 2045 - protein, 186 aa, Brassica napus
HDFVPPQPAFKCFDDDGRLKRTGTVWTASAHIITAVIGSGVLSLAWAIAQLGWVAGPAVMLVFSLVTLYSSTLLSDCYRTGDAVSGKRNYTYMGAVRSILGGFKFKICGLIQYLNLFGIAVGYTIAASISMMAIKRSNCFHKSGGKDPCHMSSNPYMIIFGVTEILLSQVPDFDHIWWISIVAAVM

SEQ ID NO: 2046 - protein, 223 aa, Brassica napus
SGPVWTARAHIITAVIGSGVLSLAWAIGQLGWIAGPAVMFLFSFVTYFSSTLLSDCYRTGDPVSGKRNYTYMDAVQSILGTVNKTYISFTQYVLGCFTLSGSVVLTGGFRFKICGLIQFLNLFGITVGYTIAASISMMGVSLSQQEVSLATKKGVKTPFNLVKAFRAIKRSNCFHESGGKNPCHMSSNPYMIMFGVTEILLSQIKDFDQIWWLSIVAAIMSFT

SEQ ID NO: 2047 - protein, 594 aa, Schizosaccharomyces pombe
MTKDAESTMTVGTYLAQRLVEIGIKNHFVVPGDYNLRLLDFLEYYPGLSEIGCCNELNCAFAAEGYARSNGIACAVVTYSVGALTAFDGIGGAYAENLPVILVSGSPNTNDLSSGHLLHHTLGTHDFEYQMEIAKKLTCAAVAIKRAEDAPVMIDHAIRQAILQHKPVYIEIPTNMANQPCPVPGPISAVISPEISDKESLEKATDIAAELISKKEKPILLAGPKLRAAGAESAFVKLAEALNCAAFIMPAAKGFYSEEHKNYAGVYWGEVSSSETTKAVYESSDLVIGAGVLFNDYSTVGWRAAPNPNILLNSDYTSVSIPGYVFSRVYMAEFLELLAKKVSKKPATLEAYNKARPQTVVPKAAEPKAALNRVEVMRQIQGLVDSNTTLYAETGDSWFNGLQMKLPAGAKFEVEMQWGHIGWSVPSAMGYAVAAPERRTIVMVGDGSFQLTGQEISQMIRHKLPVLIFLLNNRGYTIEIQIHDGPYNRIQNWDFAAFCESLNGETGKAKGLHAKTGEELTSAIKVALQNKEGPTLIECAIDTDDCTQELVDWGKAVAPPTPVLLPLITRLKRTLFGKNMLHLDYKNYLDIRNT

SEQ ID NO: 2048 - protein, 529 aa, Magnaporthe grisea
MGSVEDETALPSGGRLLLISNRLPITIKRSDDGQYSFSMSSGGLVTGLSGLAKTTSFQWYGWPGLEVPDAEAGPVVQRLKNEYGAHPVFVDDELADRHYNGFANSILWPLFHYHPGEITFDESAWSAYKEVNRLFAQTVVKDVQDGDMIWVHDYHLMLLPEMLREEIGDSKKNVKIGFFLHTPFPSSEIYRILPVRQALLQGVLHCDLLGFHTYDYARHFLSSCSRILSAPTTPNGVQFAGRFVTVGAFPIGIDPEKFVEGLQKPKVQQRIAALTRKFEGVKLIVGVDRLDYIKGVPQKLHALEVFLTEHPEWIGKIVLVQVAVPSRQDVEEYQNLRAVVNELVGRINGKFGTIEFMPIHFLHQSVSFDELAALYAVSDVCLVSSTRDGMNLVSYEYIATQRDRHGVMILSEFTGAAQSLSGSLIVNPWNTEELANAIHDAVTMGPEQREANFKKLERYVFKYTSAWWGSSFVAELNRLAAGIEGADAEGSKTKIAIRGVGDAVADGAGKVADAVSSVLPGGDNKTEGN

SEQ ID NO: 2049 - protein, 587 aa, Geobacillus stearothermophilus
MKRKTKIVCTIGPASESVDKLVQLMEAGMNVARLNFSHGDHEEHGRRIANIREAAKRTGRTVAILLDTKGPEIRTHNMENGAIELKEGSKLVISMSEVLGTPEKISVTYPSLIDDVSVGAKILLDDGLISLEVNAVDKQAGEIVTTVLNGGVLKNKKGVNVPGVKVNLPGITEKDRADILFGIRQGIDFIAASFVRRASDVLEIRELLEAHDALHIQIIAKIENEEGVANIDEILEAADGLMVARGDLGVEIPAEEVPLIQKLLIKKCNMLGKPVITATQMLDSMQRNPRPTRAEASDVANAIFDGTDAVMLSGETAAGQYPVEAVKTMHQIALRTEQALEHRDILSQRTKESQTTITDAIGQSVAHTALNLDVAAIVTPTVSGKTPQMVAKYRPKAPIIAVTSNEAVSRRLALVWGVYTKEAPHVNTTDEMLDVAVDAAVRSGLVKHGDLVVITAGVPVGETGSTNLMKVHVISDLLAKGQGIGRKSAFGKAVVAKTAEEARQKMVDGGILVTVSTDADMMPAIEKAAAIITEEGGLTSHAAVVGLSLGIPVIVGVENATTLFKDGQEITVDGGFGAVYRGHASVL

SEQ ID NO: 2050 - protein, 506 aa, Saccharomyces bayanus
MPESRLQRLANLKIGTPQELRRTSIIGTIGPKTNSCEAITALRKAGLNIIRMNFSHGSYEFHQSVIDNALKSEQQFPGRPLAIALDTKGPEIRTGRTPNDQDFHILVDHQMIFTTDAKFEHSSNDKIMYIDYANLTKVIVPGKLIYVDDGILSFKVLQIMDDANIRVQALNSGYISSRKGVNLPNTDVDLPPLSAKDIQDLQFGMRNGIHMVFASFIRAPEDVLTIRKVLGTEGEDIKIISKIENQQGLDNFDEILQVTDGVMIARGDLGIEILAPEVLAIQKKLIAKCNVAGKPVICATQMLESMTYNPRPTRAEVSDVGNAVLDGADCVMLSGETAKGDYPVNAVKIMAATALIAESTIAHLALYDDLRDATSKPTSTTETVAAAATAAILEQNGKAIVVLSTTGNTARLLSKYRPSCPIILVTRHARTARIAHLYRGVFPFVFEPKRLYDWGEDVHRRLKFGVEMARSFGMVESGDTVVSIQGFRGGIGHSNTLRVSTVGEEF

SEQ ID NO: 2051 - protein, 411 aa, Saccharomyces bayanus
EDAWNSQMDDCPSIAVVLNLPRLNIRAYQNWASLRSQTIYRTISGFMNYSRAIKLLYRVENPEIVQMFGGNADGLERELEKMARRKFKFLVSMQRLAKFKPHELENAEFLLRAYPDLQIAYLDEEPPLSEGGEPRIYSALIDGHCEILDNGRRRPKFRIQLSGNPILGDGKSDNQNHALIFYRGEYIQLIDANQDNYLEECLKIRSVLAEFEELGIEPVHPYTPGLKYEDQSNNHPVAIVGAREYIFSENSGVLGDVAAGKEQTFGTLFARTLSQIGGKLHYGHPDFINATFMTTRGGVSKAQKGLHLNEDIYAGMNALLRGGRIKHCEYYQCGKGRDLGFGTILNFTTKIGAGMGEQMLSREYYYLGTQLPIDRFLTFYYAHPGFHLNNLFIQLSLQMFMLTLVNLHALA

SEQ ID NO: 2052 - protein, 501 aa, Saccharomyces castellii
MESRLARLTTLQVTAGDNLRRTSIIGTIGPKTNNPEVLVALRKAGLNIVRMNFSHGSYEYHQSVIENARKSEELYPGRPLAIALDTKGPEIRTGTTTGEVDYPIPPNHEMIFSTDEKYAKACDDKVMFVDYANITKVISKGKIIYVDDGVLSFEVLEVVDGKTLKVKSLNAGKICSHKGVNLPGTDVDLPALSEKDKADLRFGVKNGVHMVFASFIRTAQDVLTIREVLGEDGKDIKIVVKIENQQGVNNFDEILKVTDAVMVARGDLGIEIPAPEVLAVQKKLIAKSNLAGKPVICATQMLESMTYNPRPTRAEVSDVGNAILDGADCVMLSGETAKGNYPINAVTTMADTALIAEQAIAYQPLYDDLRNLTPKPTSTTETVAASAVAAVYEQKAKAIIVLSTSGTTPRLVSKYRPDCPIILVTRNPRAARFSHLSRGVFPFVYEADSVADWTEDVELRLKFGIEKAIEMGVMKKGDTYVSIQGFKAGEGHSNTLQVSNA

SEQ ID NO: 2053 - protein, 476 aa, Saccharomyces castellii
  misc_feature (457)..(457): Xaa can be any naturally occurring amino acid
MLQSRLARLTHLRTEPSANDIRKTSIIGTIGPQSNNVPTIVALRKAGLNIIRMNFSHGSHEFHQSVIDNARESESQYHGRPLGIALDTKGPEIRTGSFVRDNGVPVKTGHEMIFSTDPQYKECGDDQIMYVDYANITKVMEVGKFIYVDDGAISFEVLQVKDAETLKVRALNDGTLNSHKGVNLPGTDVDLPALSEKDKQDLQFGVKNNIHMIFASFIRTPDDIRTIRQFLGEDGKQIKIIAKIENEQGVNNFDQILQLADGVMIARGDLGIEIPAPEVLAVQKKLIAKCNLAGKPVICATQMLESMTYNPRPTRAEVSDVGNAILDGADCVMLSGETAKGAYPIDAVNMMADTALIAEEATAYLPNYDDIRNCTPKPTPTTETVAASAVAAVFEQDAKAIIVLSTSGDTARLCSKYRPNCPIILITRNDNTARFSHLYRAVFPFVYNKPALDDWVXDVQNRIDFGIEMAKQMGIL

SEQ ID NO: 2054 - protein, 1337 aa, Saccharomyces castellii
MSYHDRDVHNQEPTIDQYGQPIYPQDDSYSQDGESHQEQYMNENYSDFSSFAAPNGAHNNTNSASTYDDSYGGQYTSSQVSYSEQTGTSTPVFGSGPFNMPDGLNVGLPNDPYPAWTADEDAPVNIEQIEDIFIDLTNKFGFQRDSMRNIFDHFMTLLDSRASRMTPAQALISLHADYIGGDTSNYKKWYFAAQLDMDDEIGFRNVKMGKLSRKARKAKKSNKKAIKHSSPEAVEATLQQLEGDNSLQAADYRWKAKMSSLSPEEMVRQLALYLLCWGEANQVRFTSECLCFIYKCAYDYYQSPECQQRTQPLPEGDYLNRIISPLYHFLRDQVYEVADNRYIKRERDHNKVIGYDDVNQLFWYPEGIAKIIMEDGRKLIDLPSEDRYLRLGDVIWGNVFFKTYKETRTWLHMVTNFNRIWIMHISVYWMYVAYNAPTLYTHNYQQLVDNQPLASYRWATAALGGTVASLIQLVATLCEWTFVPRNWAGAQHLSRRFMFLFFIFAANFAPVLFVFIYEKDTVYSKAGYIVGIVMFFVAVVTMVYFSVMPLGGLFTSYMNKSSRRYVASQTFTASFAPLKGIDRWLSYLVWVVVFGAKYAESYYFLILSLRDPIRILSTMTMRCTGEYWWGAKLCKHQSKIVLGLMIATDFILFFLDTYLWYIIVNTIFSVGKSFYLGISVLTPWRNIFTRLPKRIYMKILATSHAQVKYKPKVLISQVWNAIIISMYREHLLAIDHVQKLLYHQVLSEVQGKRSLRAPTFFTSQDGKSIEGEFFPKDSEAERRISFFAQSLTIPIKEPLPIDNMPTFTVLTPHYSERILLSLREIIREDDQFSRVTLLEYLKQLHPLEWDCFVKDTKILAEETAIYEGNEEETDKDDAMKSEIDDLPFYCIGFKSAAPEYTLRTRIWASLRSQTLYRTVSGFMNYSRAIKLLYRVENPEIVQMFGGNAEGLERELEKMTRRKFKFLVSMQRLAKFKPHELENAEFLLRAYPDLQIAYLDEEPPLNEGEEPRIYSALIDGHCEILENGRRRPKFRVQLSGNPILGDGKSDNQNHALIFYRGEYIQLIDANQDNYLEECLKIRSVLSEFEEIYAEPFNPYIPGMKYEEQTTNHPVAIVGAREYIFSENSGVLGDVAAGKEQTFGTLFARTLSQIGGKLHYGHPDFINATFMTTRGGVSKAQKGLHLNEDIYAGMNAMLRGGRIKHCEYYQCGKGRDLGFGTILNFTTKIGAGMGEQMLSREYYYLGTQLPIDRFLSFYYAHPGFHLNNLFIQLSLQMFMLTLVNLHALAHESIICLYDRNKPITDVQYPLGCYNLAPVNDWVRRWELEFHHRARINRRP

SEQ ID NO: 2055 - protein, 422 aa, Saccharomyces castellii
PHYAERILLSLREIIREDDQFSRVTLLEYLKQLHPVEWDCFVKDTKILAEETAAYEGNEDDGEKDGGLKAQIDDLPFYCIGFKSAAPEYTLRTRIWASLRFQTLYRTVSGFMNYSRAIKLLYRVENPEIVQMFGGNAEGLEKELEKMARRKFKFLVSMQRLAKFKPHELENAEFLLRAYPDLQIAYLDEEPPLNEGEEPRIYSALIDGHCEILENGRRRPKFRVQLSGNPILGDGKSDNQNHALIFYRGEYIQLIDANQDNYLEECLKIRSVLAEFEELNVEQVNPYAPDLKYEEQVTNHPVAIVGAREYIFSENSGVLGDVAAGKEQTFGTLFARTLSQIGGKLHYGHPDFINATYMTTRGGVSKAQKGLHLNEDIYAGMNALLRGGRIKHCEYYQCGKGRDLGFGTILNFTTKIGAGMGE

SEQ ID NO: 2056 - protein, 501 aa, Saccharomyces kluyveri
MESRLGWLTELQTETGANLRRTSIIGTIGPKTNNPETLVALRKAGLNIVRMNFSHGSYEYHQSVIDNARKSEELYPGRPLAIALDTKGPEIRTGTTTNEVDYPIPPNHEMIFSIDDKYAKACDDKVMYIDYKNITKVIEKGKIIYVDDGVLSFEVLEVVDEQTLKVKSLNAGKICSHKGVNLPGTDVDLPALSEKDKSDLRFGVKNGVHMVFASFIRTAQDVLTIREVLGEDGKDVKIIVKIENQQGVNNFDEILKVTDGVMVARGDLGIEIPAPQVFAVQKKLIAKCNLAGKPVICATQMLESMTYNPRPTRAEVSDVGNAVLDGADCVMLSGETAKGNYPINAVTIMAETALIAEQAIPYVATYDDLRNFTPKPTSTTETIAAAAVSSVFEQKAKAIIVLSTTGDTPRLVSKYKPNVPIVMVTRNPRAARFSHLYRGVFPFVYESDTESEWTKDVESRLNFGIAKAKEFGMLKEGDTIVTIQGFAAGVGHSNTLRVLTV

SEQ ID NO: 2057 - protein, 1443 aa, Saccharomyces kluyveri
SNFSGCTNDLHVSDIPSTVERQKSLYPSWNDDAPLTENEIQSILTGLQRAFQFQKDNVSNIYDYLMSMLDSRASRMGPMEALNSLYQDYVGVRGSNFMKWYASSRIDVIGGAKDKELFGDAKPGWAKSTAPSDLILQVSLYLLCWGEANHVRFMPECLCFIFKVCCDYYYYSYCHDMKTGRVPWAGKRPLPFLDHVITPLYNFHKSQQCSLNGDVASLKDHSKVIGYDDINQFFWHREDLDRLKLQNNTLLNTIPIEQHYLFLNQIDWSRCFYKTYYESRTWFHVVTNFNRIWIIHLSVFWYYTTFNSKPIYTQYYDQTIDNQPTIQCTLSALSIAGVIATLVNLFATIGELLFVPRKFPGALTLTLGRRIFILMGILFLNLSPSIYIFGVHPWNTVTKIGLTLAVCQFVLSLVTVAYFSVVPLQHLFTMSNGEEQSPEQSFVNFIVPLQRRNHLASVFFWTLVFASKFVESYFFLTLSLKDPIRELSSIASKHCDIDSFVSGMVCQFQPKVLLAMMILTDAVLFFLDTYLWYVIFSTFFSTARSFYLGISIWTPWRNVFSKLPKRIFSKIIFSNQCHHYSCGQQQVAKVWNEIIWSMYREHLISDEHVQKLVYHQIATPDQTNGCMVEEPAFLHFQEEHFFKSSLFHSHRSAKRRITFFARSLVCPMPETSSVENMPVFTVLIPHYNEKILLSIREIVKEEDEYSHVTLLEYLKSLYRNEWMCFVAETRRLAEESFEENSKEDLASSTSPSLPTIVGDKPSTLSYSFAGFKTATSDFILRTRMWTSLRTQTLFRTVSGFMNYSKAISLLHSVEKSPKHTPESADFVALHKFRMVVSMQKMNSFGKEDIENRDHLLRLYPHLQIAYIDEEYDPDNGKKTYYSALIDGHCEILESGQRKPRYRIRLSGNPILGDGKSDNQNHAIIFGRGEYIQLVDANQDNYLEECLKIKSVLKEFEYDSNFLPTDVEGSNSPPVAIVGTREYIFSEKIGVLEDIAAGKEQVFGTLFARTLSYLGGKLHYGHPDFLNVAFLTTRGGVSKAQKGLHLNEDIYTGMDSVMRGGIIKHCEYNQCGKGRDLGFGSILNFTTKIGAGMGEQLLSREYYYFGTLLPLDRFLTFYYAHPGFHLNNVLIMFSIKLFIIFMINLAVLIHESVLCQYNSQLEIIEPRIPMGCVNLISVVFWLRRSILSILAVSSISFFPLFVQELSDSGAQKAVTRIVKHFFSLAPIFEVFVCKVFAGSLVNDLLYGGARYISTGRTYSTVRVPFASLYSRFAPETFYFSTSFILLLLYSSMVIWDPSFLYFWFTIVSLLISPFIFNPNQFMWSDFLVDYREYLRWLFRIDTNPNNLAWKGFVRGFGTDAMGKKTRRLLKFGNRLNSDLKRPTLQGRLFSDVLPDFLFTILVLIPFLFLGYQAQNPSHEFSNPLLRVAIVSILPIACNSVMLLA

SEQ ID NO: 2058 - protein, 501 aa, Kluyveromyces lactis
MESRLGWLTDLSTETGTNLRRTSIICTIGPKTNNPETLVELRKAGMNIVRMNFSHGSYEYHQSVIDNARKSEELYQGRPLAIALDTKGPEIRTGTTTNDVDYPIPPNHEMIFTTDDKYAKACDDKTMYVDYKNITKVIEAGRIIYVDDGVLSFEVLEVIDDNTLKVKSLNAGKICSHKGVNLPGTDVDLPALSEKDKSDLKFGVKNGVHMVFASFIRTAQDVLTIREVLGEQGKDIKIIVKIENQQGVNNFDDILKVTDGVMVARGDLGIEIPAPQVFAVQKKLIAKCNLAGKPVICATQMLESMTYNPRPTRAEVSDVGNAVLDGADCVMLSGETAKGNYPINAVKTMAETALIAEQAIPYIPTYDDLRNLTPKPTSTTETIAAASVSAVFEQKARALIVLSTTGDTPRLVAKYKPNVPIVMVTRNPRAARFSHLYRGVFPFVYDESSDSEWTVDVEKRINFGVKKAKEFGILVDGDTIVTIQGFAAGVGNSNTLRVLTV

SEQ ID NO: 2059 - protein, 174 aa, Secale cereale
MASTTFSSAFSILSLPSSSPSPPPWAPRTLPVANRRRRAAAVASTVTESPKVLELGDAIAGLTLEEARNLVDHLQERLCVSAASFPPAAAGLRAAAVEEAPVEQTEFDVVIEEVPSSARIATIKIVRALTNLALKEAKDLIEGLPKKLKEAVSKDEAEEAKKQLEGVGAKVSIA

SEQ ID NO: 2060 - protein, 474 aa, Perilla frutescens
MQSLHSTGLRPSPLDPLLKPHRSSAAALPGSNARPPAKKLPFRVSAAAAVAAAPKRETDPKKRVVITGMGLVSVFGNDVDAYYEKLLSGESGITLIDRFDASKFPTRFGGQIRGFKAEGYIDGKNDRRLDDCLRYCIVAGKKALEGADLGGEKLNKIDKIRAGVLVGTGMGGLTVFSDGVKALIEKGHRKITPFFIPYAITNMASALLAIDLGLMGPNYSISTACATSNYCFYAAANHIRRGEADLMIAGGTEAAMIPIGLGGFVACRALSQRNDDPQTASRPWDKDRDGFVMGEGSGVLVMESLEHAMKRGAPIIAEYLGGAVNCDAYHMTDPRADGLGVSSCIQSALEDSGVSPEEVNYINAHATSTIVGDLADVNAIKKVFKNTSGIKINATKSMIGHCLGAAGGLEAIASVKAITTGWLHPTINQFNPEPSIGFDTVANEKQQHEVNVAISNSFGFGGHNSVVAFSAFKP

SEQ ID NO: 2061 - protein, 570 aa, Neurospora crassa
MVAQQQGKFTVGDYLAERLAQVGVRHHFVVPGDYNLILLDKLQAHPDLKEVGCANELNCSLAAEGYARANGISACVVTYSVGALSAFNGTGSAYAENLPLVLISGSPNTNDPSQYHILHHTLGHPDYTYQYEMAKKITCCAVAIPRAIDAPRLIDRALRAAILARKPCYIEIPTNLAGATCVRPGPISAITDPITSDKSALEAAAKCAAEYLDGKLKPVILVGPKAGRAGSEKELIEFAEAMGCAVALQPAAKGMFPEDHKQFVGIFWGQVSSDAADAMVHWADAMICVGAVFNDYSTVGWTAVPNIPLMTVDMDHVTFPGAHFSRVRMCEFLSHLATQVTFNDSTMIEYKRLKPDPPHVHTAEREEPLSRKEISRQVQEMLTDKTSLFVDTGDSWFNGIQLKLPPGAKFEIEMQWGHIGWSIPAAFGYALRHPDRHTIVLVGDGSFQVTAQEVSQMVRFKVPITIMLINNRGYTIEVEIHDGSYNKIKNWDYAMLVEAFNSTDGHAKGLLANTAGELADAIKVAESHKEGPTLIECTIDQDDCSKELITWGHYVAAANARPPRNMSVQE

SEQ ID NO: 2062 - protein, 469 aa, Ricinus communis
MQALQSPSLRPSPLTPLHKNTHNAAKRPTKKVSFITASSTNNNTTISAPKREKDPRKRVVITGTGLVSVFGNDVDTYYDKLLAGESGIGLIDRFDASKFPTRFGGQIRGFNSQGYIDGKNDRRLDDCLRYCIVAGKKALEHADLGGDKLSKIDKERAGVLVGTGMGGLTVFSDGVQALIEKGHRKITPFFIPYAITNMGSALLAIELGLMGPNYSISTACATSNYCFYAAANHIRRGEAELMIAGGTEAAIIPIGLGGFVACRALSQRNDDPQTASRPWDKDRDGFVMGEGAGVLVMESLEHAMKRGAPIIAEYLGGAVNCDAYHMTDPRADGLGVSSCIERSLEDAGVSPEEVNYINAHATSTLAGDLAEINAIKKVFKNTSDIKINATKSMIGHCLGAAGGLEAIACVKAITTGWLHPTINQFNPEPSVEFDTVANKKQQHEVNVAISNSFGFGGHNSVVAFSAFKP

SEQ ID NO: 2063 - protein, 194 aa, Picea abies
DPGPDGFTMDFFHHCWDIIRKDVWEVVEESHTSGQVLQAFNATFLTLIPKEEWVTNPKHFRPIALCNVIYKIITKVIANRLKPILPLIISQEQAGYVEGKKIMDSFILAHEVISSLKTEKIPGMLIKLDLSKAFDKAKWFYLKATLPAFGFDHTWVNWILNLTSSAFFSILVNEVPSQPFSASRGIRQGYPFRP

SEQ ID NO: 2064 - protein, 182 aa, Picea abies
DPGPDGFTNDFFHHCWAMIRHEVWEILEDSRAMGQVLQALNATFITLIPKEGNALRPAQYRPIALCNVIYKLLTKVIARRFKPLLPAIISPEQSGYVEGRKIMDSVILSHEVIHSPQKTKIPGMLLKLDLSKAFDKLSWEFMRAMLIAFGFDQKWVTWIFNLTSSAFFSLLINGVPSAPFSP

SEQ ID NO: 2065 - protein, 479 aa, Schizosaccharomyces pombe
MSDLRFLDLVKPFAPFLPEIAAPERKVPFKQKMLWTGVTLLIFLVMSQVPLYGIVSSDSSDPLLWLRMILAANRGTLMELGISPIVTSSMLVQLLVGSQLIEVNMELKSDREMYQLVQKFLAIIIAFGQATAYVLTGMYGRPQDLGAGICLLLILQLAAASLIVLLLDELLQKGYGLGSGISLFIATINCENIFWKAFSPTTYHIANGVQFEGAVINFVYVMFTWDNKAAALYQAFFRSGLTSSQIQLPNLWNFFATLLVFGVVIYLQDFRVEIPIRSQKFRGYRSTFPVKLLYTSNTPIMLQSALTSNLFFASRLLFNRFSSNFLVRFLGVWEQTATSGLSYYLSPPASFQDALIDPIHTLVYVFFTMFACALFSKLWIEVSGASPRDVAKQLKSQQLVMAGHREGSMYKELKRIIPTAAWLSGAVVGALAVASDLLGALGSGTAVLLCTTTIYGYYEQLQKEIKGDQYGLPVTPMMQ

SEQ ID NO: 2066 - protein, 305 aa, Saccharomyces cerevisiae
MSSSSQFKQLEKLGNGTYATVYKGLNKTTGVYVALKEVKLDSEEGTPSTAIREISLMKELKHENIVRLYDVIHTENKLTLVFEFMDNDLKKYMDSRTVANTPRGLELNLVKYFQWQLLQGLAFCHENKILHRDLKPQNLLINKRGQLKLGDFGLARAFGIPVNTFSSEVVTLWYRAPDVLMGSRTYSTSIDIWSCGCILAEMITGKPLFPGTNDEEQLKLIFDIMGTPNESLWPSVTKLPKYNPNIQQRPPRDLRQVLQPHTKEPLDGNLMDFLHGLLQLNPDMRLSAKQALHHPWFAEYYHHAS

SEQ ID NO: 2067 - protein, 250 aa, Triticum aestivum; identical to SEQ ID NO: 939

SEQ ID NO: 2068 - protein, 496 aa, Glycine max
MATSDSNMLLNYVPVYVMLPLGVVNVDNVFEDPDGLKEQLLQLRAAGVDGVMVDVWWGIIELKGPKQYDWRAYRSLFQLVQECGLTLQAIMSFHQCGGNVGDIVNIPIPQWVLDIGESNHDIFYTNRSGTRNKEYLTVGVDNEPIFHGRTAIEIYSDYMKSFRENMSDFLESGLIIDIEVGLGPAGELRYPSYPQSQGWEFPRIGEFQCYDKYLKADFKAAVARAGHPEWELPDDAGKYNDVPESTGFFKSNGTYVTEKGKFFLTWYSNKLLNHGDQILDEANKAFLGCKVKLAIKVSGIHWWYKVENHAAELTAGYYNLNDRDGYRPIARMLSRHHAILNFTCLEMRDSEQPSDAKSGPQELVQQVLSGGWREDIRVAGENALPRYDATAYNQIILNAKPQGVNNNGPPKLSMFGVTYLRLSDDLLQKSNFNIFKKFVLKMHADQDYCANPQKYNHAITPLKPSAPKIPIEVLLEATKPTLPFPWLPETDMKVDG

SEQ ID NO: 2069 - protein, 319 aa, Solanum tuberosum
MAVNGSALSSGLIVSFGEMLIDFVPTVSGVSLAEAPGFLKAPGGAPANVAIAVTRLGGKSAFVGKLGDDEFGHMLAGILKTNGVQADGINFDKGARTALAFVTLRADGEREFMFYRNPSADMLLTPDELNLDLIRSAKVFHYGSISLIVEPCRSAHLKAMEVAKEAGALLSYDPNLRLPLWSSEAEARKAIKVSDVELEFLTGSDKIDDESAMSLWHPNLKLLLVTLGEKGCNYYTKKFHGSVGGFHVKTVDTTGAGDSFVGALLTKIVDDQAILEDEARLKEVLRFSCACGAITTTKKGAIPALPTESEALTLLKGGA

SEQ ID NO: 2070 - protein, 412 aa, Aquifex aeolicus
MAVKVNKEFCSFCGKRQDEVLILIAGPNNTYICDECVEKCYQIVRENKKTSYNFELKDIPKPEQIKKILDEYVIGQERAKKILSVAVYNHYKRIKAKEAGLSLDDVELEKSNILLIGPTGSGKTLLARTLAKILNVPFAIADATSLTEAGYVGEDVENVLVRLLQACDYDVKAAQKGIVYIDEIDKIAKKSGINPSITRDVSGEGVQQALLKIVEGSVVNVPPQGGRKHPHQEFIQVDTTDILFICGGAFVGLEDIIKQRLGKSRVGFEAEIKKVDKEQDLLELVEPDDLIRFGMIPEFIGRFPVIATLRELTEDELVRILVEPKNALVKQYQKLFELEGVKLTFTEKALREIAKEAIRRKTGARGLRAIMEDIMADIMFEVPSLPGVKEVIIDENVVKNKEKPKLIFEQAV

SEQ ID NO: 2071 - protein, 580 aa, Lycopersicon peruvianum
ELLVGTPAKRQAVTNPTNTLSGTKRLIGRRFDDPQTQKEMKMVPYKIVKGSNGDAWVEANGQQYSPSQIGAFILTKMKETAEAYLGKSINKAVITVPAYFNDAQRQATKDAGRIAGLDVQRIINEPTAAALSYGMNSKEGLVAVFDLGGGTFDVSILEISNGVFEVKATNGDTFLGGEDFDNALLEFLVSEFKRTEGIDLSKDKLALQRLREAAEKAKIELSSTSQTDINLPFITADASGAKHLNITLTRSKFETLVNNLIERTRNPCKNCLKDAGVSLKDVDEVLLVGGMTRVPKVQEIVSEIFGKSPSKGVNPDEAVAMGAALQGGILRGDVKELLLLDVTPLSLGIETLGGIFTRLINRNTTIPTKKSQVFSTAADNQTQVGIKVLQGEREMASDNKLLGEFELVGIPPAPRGMPQIEVTFDIDANGMVTVSAKDKATSKEQQITIRSSGGLSEDEIDKMVREAEMHAQKDQERKALIDIRNSADTTIYSIEKSLSEYKDKVPKEVVTEIETAISDLRAAMGTENIDDIKPKLDAANKAVSKIGEHMAGGSSGGASGGGGAQGGDQPPEAEYEEVKK

SEQ ID NO: 2072 - protein, 1033 aa, Kluyveromyces lactis
MSDGGIEIDFQAFYDRFTKLGKAYSGFEGSPNSLLFVLGSTNEENPYQKTTILHNWLLGYEFPATLIAFFKDKGVIITSSAKAKHLLPAVTKFEGSDYKLEIWQRNNKDANHNKKLFEDLIKLLSENGNTVGVPTKDSYQGKLILEWKPLWEEAKKDAFFNVIDCSAGLSSTWKGKDDKEKAYLSVSSKGSDKFMDLMSNEIVNAVDEELKISNSKLSDKIENKIDDSKFLKKLSSDLNPLCPTDEKFDVNFLDWAYSPIVQSGSKFDLKVSARSNNDSLFGKGSILASCGIRYKNYCSNITRTFLIDPTDEMTDNYDFLLILQEKIIDDLLKVEADPTSIYEKTLEFIKEKKPELLSHFTKNVGSLMGLEFRDSAGMINAKPTAHKISENCCYNISLGFGNLKDSKTGQVYAVQLADTVQLSSDGKPSTLTKYTKARSQISFYFNNEEENKAATVKSEKSKPPALPKPDGTSKILRSKLRGESRADDEEKEQIRKENQRKLHERLQKEGLLRYSDADAVDGDEKPKHFFKKYESYVRETQIPSNVRDLKIHVDWKSQTIILPIYGRPVPFHINSYKNGSKNEEGEYTYLRLNFHSPGAGGVGKKTEELPYEENPENQFVRSLTLRSKDGARMSDVFKQITDLKKESTKREQERKALADVVVQAKLVENKTGRTKRLDQIFVRPSPDTKRVPGTVFIHENGIRYQSPLRTDSRIDILFSNIKNLFFQSSKGELIVIIHVHLKNPILMGKKKIQDIQFYREASDMAVDETGNSRRNNMKFRRYGDEDELEQEQEERRKRAALDKEFRYFAEAIAEASDGLLDVDSPFRDLGFQGVPSRSAVFCMPTRDCLIQLVEPPFLVINLNEVEICILERVQFGLKNFDMVFVYKDLTKPVSHINTVPIEQLEFIKTWLTDVDIPYTVSTINLNWSTIMKSLQDDPHQFFLDGGWSFLATGSDDERSDESEEEISEYEASDEDPSDEEVYSEEEEDYSDDEKFSDEGSDDFADGSEDDEGDDWDDLEKKAAKADRNSNYKE

SEQ ID NO: 2073 - protein, 220 aa, Neurospora crassa
ALIDGHCEILDNGRRRPKFRVQLSGNPILGDGKSDNQNHALIFYRGEYIQLIDANQDNYLEECLKIRSVLAEFEELNVEQVNPYAPGLRYEEQTTNHPVAIVGAREYIFSENSGVLGDVAAGKEQTFGTLFARTLSQIGGKLHYGHPDFINATFMTTRGGVSKAQKGLHLNEDIYAGMNAMLRGGRIKHCEYYQCGKGRDLGFGTILNFTTKIGIGMGEK

SEQ ID NO: 2074 - protein, 584 aa, Bacillus subtilis
MRKTKIVCTIGPASESIEMLTKLMESGMNVARLNFSHGDFQEHGARIKNIREAAEKLGKNVGILLDTKGPEIRTHTMENGSIELNAGSKLVISMTEVIGTPDKISVTYEGLVHDVNKGSTILLDDGLIGLEVLDVDAVKREIKTKVLNNGTLKNKKGVNVPGRKCQSSGITEKDARDIVFGIEQGVDFIAPSFIRRSTDVLEIRELLEEHNAQDIQIIPKIENQEGVDNIDAILEVSDGLMVARGDLGVEIPAEEVPLVQKELIKKCNALGKPVITATQMLDSMQRNPRPTRAEASDVANAIFDGTDAIMLSGETAAGSYPVEAVQTMHNIASRSEEALNYKEILSKRRDQVGMTITDAIGQSVAHTAINLNAAIVTPTESGHTARMIAKYRPQAPIVAVTVNDSISRKLALVSGVFAESGQNASSTDEMLEDAVQKSLNSGIVKHGDLIVITAGTVGESGTTNLMKVHTVGDIIAKGQGIGRKSAYGPVVVAQNAKEAEQKMTDGAVLVTKSTDRDMITSLEKASALITEEGGLTSHAAVVGLSLGIPVIVGLENATSILTDGQDITVDASRGAVYQGRASVL

SEQ ID NO: 2075 - protein, 928 aa, Arabidopsis thaliana
MEERKELWNDLRDHSDSPIIRSKPWIIFGDFNEILDMEEHSNSRENPVTTTGMRDFQMAVNHCSITDLAYHGPLFTWSNKRENDLIAKKLDRVLVNDVWLQSFPRSYSVFEAGGCSDHLRCRINLNVGAGAVVKGKRPFKFVNVITEMEHFIPTVESYWNETEAIFMSTSSLFRFSKKLKGLKPLLRNLGKERLGNLVKQTKEAFETLCQKQAMKMANPSPSSMQEENEAYAKWDHIAVLEEKFLKQRSKLHWLDIGDRNNKAFHRAVVAREAQNSIREIICHDGSVASQEEKIKTEAEHHFREFLQLIPNDFEGIAVEELQDLLPYRCSDSDKEMLTNHVSAEEIHKVVFSMPNDKSPGPDGYTAEFYKGAWNIIGAEFILAIQSFFAKGFLPKGINSTILALIPKKKEAKEMKDYRPISCCNVLYKVISKIIANRLKLVLPKFIVGNQSAFVKDRLLIENVLLATEIVKDYHKDSVSSRCALKIDISKAFDSVQWKFLINVLEAMNFPPEFTHWITLCITTASFSVQVNGELAGVFSSARELRQGCSLSPYLFVISMDVLSKMLDKAVGARQFGYHPKCRAIGLTHLSFADDLMILSDGKVRSIDGIVKVLYEFAKWSGLKISMEKSTMYLAGVQASVYQEIVQKFSFDVGKLPVRYLGLPLVSKRLTASDCLPLIEQLRKKIEAWTSRFLSFAGRLNLISSTLWSICNFWMAAFRLPRACIREIDKLCSAFLWSGTELSSNKAKVSWEAICKPKKEAWHKGVWFAHETPKHSFCVWLAIWNKLSTGQRMQHWNLQSSVGCVLCNNNLETRDHLFFSCAYTSGIWEALAKNLLQRSYTTDWQTIISYVSGQCHDRVSCFLARSVLQASVYTIWRERNGRRHGETPNPAARLIQWIDKHIRNMLSVIHQKGDKRYDKGLQMWFAYRS

SEQ ID NO: 2076 - protein, 502 aa, Lactococcus lactis
MNKRVKIVSTLGPAVEIRGGKKFGESGYWGESLDVEASAKNIAALIEEGANVFRFNFSHGDHPEQGARMATVHRAEEIAGHKVGFLLDTKGPEMRTELFTDGADSISVVTGDKFRVATKQGLKSTPELIALNVAGGLDIFDDVEIGQTILIDDGKLGLSLTGKDAATREFEVEAQNDGVIGKQKGVNIPNTKIPFPALAERDDADIRFGLSQPGGINFIAISFVRTANDVKEVRRICEETGNPHVQLLAKIENQQGIENLDEIIEAADGIMIARGDMGIEVPFEMVPVYQKLIISKVNKAGKIVVTATNMLESMTYNPRATRSEISDVFNAVIDGTDATMLSGESANGKYPRESVRTMATVNKNAQTMLKEYGRLHPERYDKSTVTEVVAASVKNAAEAMDVKLIVALTESGNTARLISKHRPDADILAITFDEKVERGLMINWGVIPMMTEKPASTDDMFEVAEKVALASGLVEAGDNIIIVAGVPVGTGRTNTMRIRTVK

SEQ ID NO: 2077 - protein, 611 aa, Bacillus sphaericus
MSKIIGIDLGTTNSCVSVLEGGEPKVIPNPEGNRTTPSVVAFKNGERQVGEVAKRQSVTNPNTIISIKSKMGTAEKVTVEDKDYTPQEVSAMILQYLKGYAEDYLGEKVTKAVITVPAYFNDAQRQATKDAGKIAGLEVERIINEPTAAALRYGLDKQDQDQKVLVFDLGGGTFDVSILELGDGVFEVLATAGDNKLGGDDFDDAIIEYLVAEFKKENGIDLSKDKMAMQRLKDAAEKAKKDLSGVTSTQISLPFITAGEAGPLHLEISLTRAKFDEITLPLVNRTVGPVRQALSDAGLSTSEIDQVILVGGSTRIPAVQEAVRKETNKEPHRGVNPDEVVAMGAAVQGGVLTGDVKDVVLLDVTPLSLGIETMGGVFTKLIDRNTTIPTSKSQVFSTAADNQPAVDIHVLQGERSMAADNKTLGRFQLADIPPAPRGVPQIEVTFDIDKNGIVSVKAKDLGTNKEQTIVIQSDSGLSEAEIERMVKDAEANRDADAKRKEEADLRNEADQLVFQVDKTITDLGEQITEDEKKSVEDARDELKKALEAGELEGIKAAKEKLEGVLQPLVMKVYEQAAAAAQARQGGEADAGAGKKDDGVVDADFEEVKDDK

SEQ ID NO: 2078 - protein, 650 aa, Burkholderia pseudomallei
MGKIIGIDLGTTNSCVAIMEGNQVKVIENSEGARTTPSIIAYMDDNEVLVGAPAKRQSVTNPKNTLFAVKRLIGRRFEEKEVQKDIGLMPYAIIKADNGDAWVEAHGEKLAPPQVSAEVLRKMKKTAEDYLGEPVTEAVITVPAYFNDSQRQATKDAGRIAGLEVKRIINEPTAAALAFGLDKAEKGDRKIAVYDLGGGTFDVSIIEIADVDGEMQFEVLSTNGDTFLGGEDFDQRIIDYIIGEFKKEQGVDLSKDVLALQRLKEAAEKAKIELSSSQQTEINLPYITADASGPKHLNLKVTRAKLEALVEDLVERTIEPCRTAIKDAGVKVSDIDDVILVGGQTRMPKVQEKVKEFFGKEPRRDVNPDEAVAVGAAIQGQVLSGDRKDVLLLDVTPLSLGIETLGGVMTKMINKNTTIPTKHAQVYSTADDNQGAVTIKVFQGEREMAAGNKLLGEFNLEGIPPAPRGVPQIEVTFDIDANGILHVGAKDKATGKENKITIKANSGLSEAEIEKMVKDAEANAAEDHKLRELAESRNQGDALVHSTKKALTEYGDKLEAGEKEKIEAALKELEDVLKNASSDKAAIDAKVEAVATASQKLGEKMYADMQAQQAGAAGAAGAATEGASAQGGAQTADDVVDADFKEVKKD

SEQ ID NO: 2079 - protein, 607 aa, Myxococcus xanthus
MGKVIGIDLGTTNSCVAVMEGGEPVVIPNSEGSRTTPSMVGFTDSGERLVGQIAKRQAITNPENTVFAAKRLIGRKFDSPEGKKAIGVSPFKVASSPNGDAWVEIRGKGYSPPEVSAIVLMKMKQTAEDYLGEQVSEAVITVPAYFNDSQRQATKDAGRIAGLSVLRIINEPTAAALAYGLDKVQDGGTERIAVYDLGGGTFDISILELNAGVFEVKSTNGDTFLGGEDFDQRLIDYLAKRFAESNNGLDLRKDRMALQRLKEAAERAKHELSSAPETEVNLPFITADASGPKHLTETVDRATFEALVTDLIDRTIEPCRIALKDAGIPAQQINQVLLVGGMTRMPRVQQKVNEFFGREPHKGINPDEVVAVGAAIQGGVLKGEVKDVLLLDVTPLSLGVETAGGVFTKIIDKNTTIPCKKSQVFSTAVDNQPLVSVHVLQGEREMAADNKTLARFELVGIPPAPRGVPQIEVSFDIDANGIVHVSAKDLGTGKVQQVRVVSNSGLSEAEIQAMISDAQSHASDDKKKKELAELRNNADGLIYTTEKSLEEYASLLSEKDREEIKADLERLKEVLNTSDAAVLKESFQRLEGSAYRIADAIYTGQAS

SEQ ID NO: 2080 - protein, 567 aa, Saccharum robustum
  misc_feature (371)..(371): Xaa can be any naturally occurring amino acid
  misc_feature (497)..(497): Xaa can be any naturally occurring amino acid
HDGGGNAFPWSNAMLQWQRTGFHFQPQKNWMNDPNGPVYYKGWYHLFYQYNPDGAIWGNKIAWGHAVSRDLIHRRHLPLAMVPDQWYDTNGVWTGSATTLPDGRLAMLYTGSTNASVQVQCLAVPADDADPLLTNWTKYEGNPVLYPPPGIGPRDFRDPTTAWFDPSDSTWRIVIGSKDDAEGDHAGIAVVYRTRDFVHFELLPDLLHRVAGTGMWECIDFYPVATRGKVSGNGVDMSDALGKNGAVVGDVVHVMKAGMDDDRHDYCALGRYDAAANAWTPLDAEKDVGTGLRYDWGKFYASKTFYDPAKRRRVLWGWVGETDSERADVSKGWASLQGIPRTVLLDTKTGSNLLQWPVEEVETLRTNSTDXSGITIDYGSAFPLNLRRATQLDIEAEFELDRRAVMSLNEADVGYNCSTSGGAAARGALGPFGLLVLADKHLHEQTAVYFYVAKGLDGSLTTHFCQDESRSSSANDIVKRVVGSAVPVLEDETTLSXRVLVDHSIVESFAQGGRSTATSRVYPTKAIYANAGVFLFNNATAARVTAKKLVVHEMDSSYNHDYMVTDI

SEQ ID NO: 2081 - protein, 567 aa, Saccharum officinarum
HDGGGNAFPWSNAMLQWQRTGFHFQPQKNWMNDPNGPVYYKGWYHLFYQYNPDGAIWGNKIAWGHAVSRDLIHRRHLPLAMVPDQWYDTNGVWTGSATTLPDGRLAMLYTGSTNASVQVQCLAVPADDADPLLTNWTKYEGNPVLYPPPGIGPRDFRDPTTAWFDPSDSTWRIVIGSKDDAEGDHAGIAVVYRTRDFVHFELLPDLLHRVAGTGMWECIDFYPVATRGKVSGNGVDMSDALGKNGAVVGDVVHVMKAGMDDDRHDYCALGRYDAAANAWTPLDAEKDVGTGLRYDWGKFYASKTFYDPAKRRRVLWGWVGETDSERADVSKGWASLQGIPRTVLLDTKTGSNLLQWPVEEVETLRTNSTDLSGITIDYGSAFPLNLRRATQLDIEAEFELDRRAVMSLNEADVGYNCSTSGGAAARGALGPFGLLVLADKHLHEQTAVYFYVAKGLDGSLTTHFCQDESRSSSANDIVKRVVGSAVPVLEDETTLSLRVLVDHSIVESFAQGGRSTATSRVYPTKAIYANAGVFLFNNATAARVTAKKLVVHEMDSSYNHDYMVTDI

SEQ ID NO: 2082 - protein, 477 aa, Arabidopsis thaliana
MAFTSMVSTVPVLFFFFTLLLISANSSSLSHNIKVQEQDKDPFVGFNIGTDVSNLLSPTELVKFLQAQKVNHVRLYDADPELLKALAKTKVRVIISVPNNQLLAIGSSNSTAASWIGRNVVAYYPETLITAISVGDEVLTTVPSSAPLLLPAIESLYNALVASNLHTQIKVSTPHAASIMLDTFPPSQAYFNQTWHSIMVPLLQFLSKTGSPLMMNLYPYYVYMQNKGVVPLDNCLFEPLTPSKEMVDPNTLLHYTNVLDAMVDAAYVSMKNLNVSDVAVLVTESGWPSKGDSKEPYATIDNADTYNSNLIKHVFDRTGTPLHPEMTSSVYIYELFNEDLRAPPVSEASWGLFYGNSTPVYLLHVSGSGTFLANDTTNQTYCIAMDGVDAKTLQAALDWACGPGRSNCSEIQPGESCYQPNNVKGHASFAFNSYYQKEGRASGSCDFKGVAMITTTDPSKLFFSSSFSLVMVYSLKI

SEQ ID NO: 2083 - protein, 623 aa, Gossypium hirsutum
MPAVYGARLTTFEDSEKESEFGYVRKVSGPVVVADGMAGAAMYELVRVGHDNLIGEIIRLEGDSATIQVYEETAGLMVNDPVLRTHKPLSVELGPGILGNIFDGIQRPLKTIAKRSGDVYIPRGVSVPALDKDTLWEFQPKKIGEGDLLTGGDLYATVFENSLMQHHVALPPDAMGKITYIAPPGQYSLKDTVLELEFQGVKKQFTMLQTWPVRTPRPVATKLAADTPLLTGQRVLDALFPSVLGGTCAIPGAFGCGKTVISQALSKYSNSDAVVYVGCGERGNEMAEVLMDFPQLTMTLPDGREESVMKRTTLVANTSNMPVAAREASIYTGITIAEYFRDMGYNVSMMADSTSRWAEALREISGRLAEMPADSGYPAYLAARLASFYERAGKVKCLGGPERTGSVTIVGAVSPPGGDFSDPVTSATLSIVQVFWGLDKKLAQRKHFPSVNWLISYSKYSGALESFYEKFDPDFISIRTKAREVLQREDDLNEIVQLVGKDALAETDKITLETAKLLREDYLAQNAFTPYDKFCPFYKSVWMMRNIVHFNALANQAVEKAAGMDGQKITYSLIKHRLGDLFYRLVSQKFEDPAEGEEALVAKFKKLNEDLTAGFRALEDETR

SEQ ID NO: 2084 - protein, 504 aa, Emericella nidulans
MPGVEKSSQNESRLLLVSNRLPITIKRSEDGKYDFSMSSGGLVSGLSGLSKTTTFQWYGWPGLEVPEEEIPTLKNRLKEEYNAIPVFIDDELADRHYNGFSNSILWPLFHYHPGEITFDESAWEAYKEANRLFAQAVASQVQDGDLIWVHDYHLMLLPEMLREEIGNTKKNIKIGFFLHTPFPSSEIYRILPVRNELLLGLLHCDLIGFHTYDYTRHFLSACSRLLGLPTTPNGIEFQGKIIACGAFPIGIDPEKFKEGLKKEKVQKRIATLEQKFQGVKLMVGVDRLDYIKGVPQKLHALEVFLSDHPEWVGKVVLVQVAVPSRQDVEEYQNLRAVVNELVGRINGKFGTVEFMPIHFLHKSVNFDELIALYAVSDACVVSSTRDGMNLVSYEYIATQEKRHGSLVLSEFAGAAQSLNGSIIVNPWNTEELAAAYHEAVTMSDEQRALNFSKLDKYVNKYTSAFWGQSFVTELTRISEQAAGKLPTKETPVNGETSKLETSSQ

SEQ ID NO: 2085 - protein, 526 aa, Aspergillus niger
MAASSSLDHLSNRMKLEWHSKLNTEMVPSKNFRRTSIIGTIGPKTNSVEKINSLRTAGLNVVRMNFSHGSYEYHQSVIDNAREAAKTQVGRPLAIALDTKGPEIRTGNTPDDKDIPIKQGHELNITTDEQYATASDDKNMYLDYKNITKVISPGKLIYVDDGILSFEVLEVVDDKTIRVRCLNNGNISSRKGVNLPGTDVDLPALSEKDIADLKFGVRNKVDMVFASFIRRGSDIRHIREVLGEEGKEIQIIAKIENQQGVNNFDEILEETDGVMVARGDLGIEIPAPKVFIAQKMMIAKCNIKGKPVICATQMLESMTYNPRPTRAEVSDVANAVLDGADCVMLSGETAKGNYPNEAVKMMSETCLLAEVAIPHFNVFDELRNLAPRPTDTVESIAMAAVSASLELNAGAIVVLTTSGKTARYLSKYRPVCPIVMVTRNPAASRYSHLYRGVWPFLFPEKKPDFNVKVWQEDVDRRLKWGINHALKLGIINKGDNIVCVQGWRGGMGHTNTVRVVPAEENLGLAE

SEQ ID NO: 2086 - protein, 500 aa, Saccharomyces cerevisiae
MSRLERLTSLNVVAGSDLRRTSIIGTIGPKTNNPETLVALRKAGLNIVRMNFSHGSYEYHKSVIDNARKSEELYPGRPLAIALDTKGPEIRTGTTTNDVDYPIPPNHEMIFTTDDKYAKACDDKIMYVDYKNITKVISAGRIIYVDDGVLSFQVLEVVDDKTLKVKALNAGKICSHKGVNLPGTDVDLPALSEKDKEDLRFGVKNGVHMVFASFIRTANDVLTIREVLGEQGKDVKIIVKIENQQGVNNFDEILKVTDGVMVARGDLGIEIPAPEVLAVQKKLIAKSNLAGKPVICATQMLESMTYNPRPTRAEVSDVGNAILDGADCVMLSGETAKGNYPINAVTTMAETAVIAEQAIAYLPNYDDMRNCTPKPTSTTETVAASAVAAVFEQKAKAIIVLSTSGTTPRLVSKYRPNCPIILVTRCPRAARFSHLYRGVFPFVFEKEPVSDWTDDVEARINFGIEKAKEFGILKKGDTYVSIQGFKAGAGHSNTLQVSTV

SEQ ID NO: 2087 - protein, 509 aa, Triticum aestivum; identical to SEQ ID NO: 897

SEQ ID NO: 2088 - protein, 510 aa, Solanum tuberosum
MANIDIAGIMKDLPNDGRIPKTKIVCTLGPSSRTVPMLEKLLRAGMNVARFNFSHGTHEYHQETLDNLKIAMQNTQILCAVMLDTKGPEIRTGFLTDGKPIQLKEGQEITVSTDYTIKGNEEMISMSYKKLVVDLKPGNTILCADGTITLTVLSCDPPSGTVRCRCENSATLGERKNVNLPGVVVDLPTLTEKDKEDILEWGVPNNIDMIALSFVRKGSDLVNVRKALGPHAKRIQLMSKVENQEGVINFDEILRETDSFMVARGDLGMEIPVEKIFLAQKMMIYKCNLAGKAVVTATQMLESMIKSPRPTRAEATDVANAVLDGTDCVMLSGESAAGAYPELAVKIMSRICIEAESSLDNEAIFKEMIRCTPLPMSPLESLASSAVRTANKARAKLIVVLTRGGSTAKLVAKYRPAVPILSVVVPVLTTDSFDWSISDETPARHSLVYRGLIPLLGEGSAKATDSESTEVILEAALKSAVTRGLCKPGDAVVALHRIGSASVIKICVVK

SEQ ID NO: 2089 - protein, 431 aa, Lupinus luteus
MPSIAHSHVAAEPQHPKGENKQKNEGRNRRVLKDIGNLVVKQADPVANVPKRTTRNFGCQLLANAQAAAEKNKKPNTDVGNLAVVTKVEQTKKETEHEVIIISSDDEEEEKEKQVVKGGRKAREKVAGRGKNDKAFSAVLSARSKAACGLTHKPKDLVLVDDIDVADIANELEAVEYLDDIYKFYKLTEDDGRVHDYMPSQPDINIKMRSILFDWLIEVHRKFELMQETLYLTLNIVDRFLSMKAVPRRELQLVGISSMLIACKYEEIWAPEVHDFVCISDNAYVRENILIMEKTILSKLEWYLTVPTTYVFLVRYIKASTPYDKKIEDMIFFLAELSLMDYPLVISYCPSMIAASAVYAARCILGRVPYWTETLKHYTGYYEEQLRDCAKLMVNFHSVAPESKLRAVYKKFSSLERGAVALVAPTKNLLA

SEQ ID NO: 2090 - protein, 342 aa, Pyrococcus horikoshii
MLHEIPKSEILKELKRIGAKRVLIQSPEGLRREAEELAGFLEENNIEVFLHGEINYGACDPADREAKLVGCDALIHLGHSYMKLPLEVPTIFVPAFARVSVVEALKENIGEIKKLGRKIIVTTTAQHIHQLKEAKEFLESEGFEVSIGRGDSRISWPGQVLGCNYSVAKVRGEGILFIGSGIFHPLGLAVATRKKVLAIDPYTKAFSWIDPERFIRKRWAQIAKAMDAKKFGVIVSIKKGQLRLAEAKRIVKLLKKHGREARLIVMNDVNYHKLEGFPFEAYVVVACPRVPLDDYGAWRKPVLTPKEVEILLGLREEYEFDEILGGPRESDEPFGISIHSTR

SEQ ID NO: 2091 - protein, 512 aa, Streptomyces clavuligerus
MVTAAISGTDEIRARAEQALTRCGVDLTAVKGDALTARTPLTGADLFGLRAQTPEDVDRAVEAAHTAFLTWRTTPAPVRGALVKRFGELLTEHKQDLADLVTIEAGKIRSEALGEVQEMIDICDFAVGLSRQLYGRTMPSERPGHRLMETWHPLGVVGVISAFNFPVAVWAWNAAVALVCGDTVVWKPSELTPLTALACAALLDLAIADAGAPKGLNQVVVGAADVGERLVDSPRVPLVSATGSTRMGRAVGPRVAARFGRTILELGGNNAAVVTPSADLDLTVNAAVFAAAGTAGQRCTTLRRLIVHEDIADTVVERLTAAFERLPIGDPFQDTTLVGPLVNEAAFGRMREAVERATAEGGTLCAGGERQFPDAAPGAYYVRPALVRMPAQTAVVREETFAPILYVLTYRDLDEAIRLNNEVPQGLSAGIFTADQSEAERFLAPDGADCGIANVNIGTSGAEIGGAFGGEKETGGGRESGSDAWRAYMRRATNTVNYSGRVALAQGVDFSQ

SEQ ID NO: 2092 - protein, 419 aa, Chlamydia trachomatis
MTKKNLAVCSFCGRSEKDVEKLIAGPSVYICDYCIKLCSGILDKTPAPATQEIATSSTSSPTSLRVLTPKEIKRHIDSYVIGQERAKKTISVAVYNHYKRIRALMQDKQVSYGKSNVLLLGPTGSGKTLIAKTLAKILDVPFTIADATTLTEAGYVGEDVENIVLRLLQAADYDVARAERGIIYIDEIDKIGRTTANVSITRDVSGEGVQQALLKIIEGTVANIPPKGGRKHPNQEYIRVNTENILFIVGGAFVNLDKIIAKRLGRTTIGFSEETDLAVTNRDHLLAKVETEDLIAFGMIPEFIGRFNCVVNCEELTLDELVEILTEPANAIVKQYTELFEEENVKLIFEKEALYAIAQKAKQAKTGARALGMILENLLRDLMFEIPSDPTVEAIRIEEDTITQNKPPVIIQKSPEAIA

SEQ ID NO: 2093 - protein, 613 aa, Acetabularia acetabulum
MSKAKEGDYGSIKKVSGPVVVADNMGGSAMYELVRVGTGELIGEIIRLEGDTATIQVYEETSGLTVGDGVLRTKQPLSVDLGPGILGNIFDGIQRPLKAIADVSGDVFIPRGVNVPSLDQTKQWEFRPSAFKVGDRVTGGDIIGIVPENSLLDHKVMLLPQAKGTVTYIAAPGNYTINEKIIEVEFQGAKYEYSMKQSWPVRSPRPVVEKLLADTPLLTGQRVLDSLFPGVRGGTCAIPGAFGCGKTVISQALSKYSNSDGIVYVGCGERGNEMAEVLMDFPQLTMTMPDGREESIMKRTTLVANTSNMPVAAREASIYTGITLSEYFRDMGYNFAMMADSTSRWAEALREISGRLAEMPADSGYPAYLGARLASFYERSGRVACIGSPEREGSVTIVGAVSPPGGDFSDPVTSATLGIVQVFWGLDKKLAQRKHFPSVNWLISYSKYLNALEPFYEKFDSDFVTLRQVAREVLQKEDELNEIVQLVGKDALAESDKIILETARFLKEDYLQQNSFTKYDKYCPFYKSVGMMRNIVTFHRLATQAIERTAAGNVDGQKITFNIIKAKLGDLLYKVSSQKFEDPSDGEGVVTAHLNELNEELKEKFRALEDEYR

SEQ ID NO: 2094 - protein, 636 aa, Neorickettsia sennetsu
MAGEIAIGIDLGTTNSCVAIKDKVIENAEGARTTPSVVAFTSDGQTLVGAPAQRQAVTNAKNTIVASKRLIGRRFKDNVIKGIQKDYPYKIVEAKNGDAWIEAGGKSYSPSQVGANVLIKLKEAAETYTGKKVTKAVITVPAYFDDAQRTATKDAGRIAGLEVLRIINEPTAAALAYGLDKTATTKNIAVFDLGGGTFDVSILELGDGVFEVKATNGDTHLGGEDFDRMILNFLVEEFKKENGMDLKNDPLALQRLKEAAEKAKKELSSTQETDINLPYITADAAGPKHLNVKFTRAKLESLVSDLIDRTIEPCKKALKDSGLKREEINEVVLVGGMTRMPAVVKKVTEFFGKEPHKGVNPDEVVAIGAAIQANILAGGSDAQDIVLLDVTPLSLGIETLGGVFTKLIDRNTTIPTKRSQTFSTAEDNQSAVTIRVFQGERQMASDNKLLGQFSLGGIPPAPRGMPQIEVTFDIDANGIVHVSAKDKGTGKEQTVKIQASGGLTEEEIKKMVDEAASKADEDKKRRELVEAKNSAESLIHSTEKSLSEYGSKISSSDKQSIDDAISDLKSVLAKDDASLIKEKTDALSKVSMKLGEAMYKESQSASNDSSPKNDSTEEGERVVDPEYEEVKDEDSK

SEQ ID NO: 2095 - protein, 615 aa, Helianthus tuberosus
MQTPEPFTDLEHEPHTPLLDHHHNPPPQTTTKPLFTRVVSGVTFVLFFFGFAIVFIVLNQQNSSVRIVTNSEKSFIRYSQTDRLSWERTAFHFQPAKNFIYDPDGQLFHMGWYHMFYQYNPYAPVWGNMSWGHSVSKDMINWYELPVAMVPTEWYDIEGVLSGSTTVLPNGQIFALYTGNANDFSQLQCKAVPVNLSDPLLIEWVKYEDNPILYTPPGIGLKDYRDPSTVWTGPDGKHRMIMGTKRGNTGMVLVYYTTDYTNYELLDEPLHSVPNTDMWECVDFYPVSLTNDSALDMAAYGSGIKHVIKESWEGHGMDWYSIGTYDAINDKWTPDNPELDVGIGLRCDYGRFFASKSLYDPLKKRRITWGYVGESDSADQDLSRGWATVYNVGRTIVLDRKTGTHLLHWPVEEVESLRYNGQEFKEIKLEPGSIIPLDIGTATQLDIVATFEVDQAALNATSETDDIYGCTTSLGAAQRGSLGPFGLAVLADGTLSELTPVYFYIAKKADGGVSTHFCTDKLRSSLDYDGERVVYGGTVPVLDDEELTMRLLVDHSIVEGFAQGGRTVITSRAYPTKAIYEQAKLFLFNNATGTSVKASLKIWQMASAPIHQYPF

SEQ ID NO: 2096 - protein, 630 aa, Helianthus tuberosus
MMASSTTTTPLILHDDPENLPELTGSPTTRRLSIAKVLSGILVSVLVIGALVALINNQTYESPSATTFVTQLPNIDLKRVPGKLDSSAEVEWQRSTYHFQPDKNFISDPDGPMYHMGWYHLFYQYNPQSAIWGNITWGHSVSKDMINWFHLPFAMVPDHWYDIEGVMTGSATVLPNGQIIMLYSGNAYDLSQVQCLAYAVNSSDPLLIEWKKYEGNPVLLPPPGVGYKDFRDPSTLWSGPDGEYRMVMGSKHNETIGCALIYHTTNFTHFELKEEVLHAVPHTGMWECVDLYPVSTVHTNGLDMVDNGPNVKYVLKQSGDEDRHDWYAIGSYDIVNDKWYPDDPENDVGIGLRYDFGKFYASKTFYDQHKKRRVLWGYVGETDPQKYDLSKGWANILNIPRTVVLDLETKTNLIQWPIEETENLRSKKYDEFKDVELRPGALVPLEIGTATQLDIVATFEIDQKMLESTLEADVLFNCTTSEGSVARSVLGPFGVVVLADAQRSEQLPVYFYIAKDIDGTSRTYFCADETRSSKDVSVGKWVYGSSVPVLPGEKYNMRLLVDHSIVEGFAQNGRTVVTSRVYPTKAIYNAAKVFLFNNATGISVKASIKIWKMGEAELNPFPLPGWTFEL

SEQ ID NO: 2097 - protein, 876 aa, Arabidopsis thaliana
MNPFSSGTRLRDMIRAIRACKTAAEERAVVRKECADIRALINEDDPHDRHRNLAKLMFIHMLGYPTHFGQMECLKLIASPGFPEKRIGYLGLMLLLDERQEVLMLVTNSLKQDLNHSNQYVVGLALCALGNICSAEMARDLAPEVERLIQFRDPNIRKKAALCSTRIIRKVPDLAENFVNAAASLLKEKHHGVLITGVQLCYELCTINDEALEYFRTKCTEGLIKTLRDITNSAYQPEYDVAGITDPFLHIRLLRLLRVLGQGDADASDLMTDILAQVATKTESNKNAGNAVLYECVETIMAIEDTNSLRVLAINILGRFLSNRDNNIRYVALNMLMKAITFDDQAVQRHRVTILECVKDPDASIRKRALELVTLLVNENNVTQLTKELIDYLEISDEDFKEDLSAKICFIVEKFSPEKLWYIDQMLKVLCEAGKFVKDDVWHALIVVISNASELHGYTVRALYKAVLTYLEQETLVRVAVWCIGEYGDLLVNNVGMLGIEDPITVTESDAVDVIEDAITRHNSDSTTKAMALVALLKLSSRFPSISVRIKGIIVKQKGSLLLEMQQRAIEYNSIVDRHKNIRSSLVDRMPVLDEATFNVRRAGSFPASVSTMAKPSVSLQNGVEKLPVAPLVDLLDLDSDDIMAAPSPSGADFLQDLLGVDLGSSSAQYGATQAPKAGTDLLLDILSIGTPSPAQNSTSSIGLLSIADVNNNPSIALYTLSSPAPPHVATTSSTGMFDLLDGLSPSPSKEATNGPAYAPIVAYESSSLKIEFTFSKTPGNLQTTNVQATFTNLSPNTFTDFIFQAAVPKFLQLHLDPANSNTLPASGSGAITQNLRVTNSQQGKKSLVMRMRIGYKLNGKDVLEEGQVSNFPRGL

SEQ ID NO: 2098 - protein, 349 aa, Solanum tuberosum
MTTRGTTQPLLDQLHQTQHTVGLGRKRFRRSKSTPVGEIAPVEINEIKNDQSLLRSKLILDKLHPSIRKVIVYLIIYLGIGTICFYFVRSKIKGKKIDGVLDSLYFCVVTMTTVGYGDLVPNSATTKLLACVFVFSGMALVGLVLSKAADYLVEKQETLLIKALHMGCRVGPSEILEEIETNKVRYKCFMVAAFLIMLIIIGTVVLTRVEKFDTVDAFYCVCATITTLGYGDKSFSTKAGRIFSIFWILTSTLCLGRFFLYVAEWNTEKRQREIVKWVLSRRTTNVDLEEADLDDDGVVGAAEFVIYKLKEMGKINQHDVAAVLKEFESLDVDQSGTLSTADLTLAQSS

SEQ ID NO: 2099 - protein, 944 aa, Schizosaccharomyces pombe
MGRILIAHLFLPSSVGFSFDTVPHDEVGSKFMQKEESKDWIADTPLDESAIVSEEESDDDSLLSDLPEEIDSTNAQSNIATPSPGTVAAAISGIQPPPKTPSSDSPSLENSLSNLNDLFKSRGRHMAFSKNDGTNLSLPPSRHQSPPPSSVLASQRHHRRHDSELEEFARRASRSLSFSMNGTPQRRMTFDAEAWKNVIFKIKPSSFGNASFYNAISAATRSKQFDDHLFVGTCGIPTDSLPDSLKERISHDYITEHSSLVVYPTDTDFVGHYNHYCKNILWPTFHYQIPDNPKSKAYEDHSWANYVKVNKAFADTIVDNYEQDDMIWINDYHLLLVPEMVRERLPRAKIGFFLHIPFPSSEVFRCLATRQEILKGMLGANILGFQIPEFAYHFLQTCSRLVNIDIRKNGVVSFENRQIDVIALPISIDPGFIDRCLASPPVEHWAKVLQDRFRGKHIILSHDKLDPIRGLRSKLISFERFLQKYPEYRENTILLQVAPESLQDSEHLPHISDIVTRINSAYSNIASRHVPVILLRQKLGYAQFLALMMISDALIDNSLREGISLTSHQFIYVQRKRHRPLILSEFVGSASILNDNAIIVNPWDYSKTAEAFRTALTMSEEECQKRNKAMCNLILRHDAASWAVTFQSLIKESWKEQIDMQRIPAFTAQLIKEPYQNAQKRLILLYFEGTISTWGSQYHNVMTSLQRTINLLNMLTSDPKNTVYVFSALSCQELEQLFQRVPKLGIVAENGCFVRSPPKGDATMPVSKKEIAELWKNKVLGTDLTWMKTVSEIFEYYAERTTGAYVENKDATVILHLREAEDDEAAMWAAKECCESVNNFNVPCSATIQNDMVVCRSNKVSKRLAAEDIYSANGGDYDFIFAASNDPDDDTVFSWMKNFKQSKKEVVPFTFSVCVSEHGNSTNADAESSGVFGFLQALEKVYSA

SEQ ID NO: 2100 - protein, 557 aa, Saccharomyces cerevisiae
MSQDENIVKAVEESAEPAQVILGEDGKPLSKKALKKLQKEQEKQRKKEERALQLEAEREAREKKAAAEDTAKDNYGKLPLIQSRDSDRTGQKRVKFVDLDEAKDSDKEVLFRARVHNTRQQGATLAFLTLRQQASLIQGLVKANKEGTISKNMVKWAGSLNLESIVLVRGIVKKVDEPIKSATVQNLEIHITKIYTISETPEALPILLEDASRSEAEAEAAGLPVVNLDTRLDYRVIDLRTVTNQAIFRIQAGVCELFREYLATKKFTEVHTPKLLGAPSEGGSSVFEVTYFKGKAYLAQSPQFNKQQLIVADFERVYEIGPVFRAENSNTHRHMTEFTGLDMEMAFEEHYHEVLDTLSELFVFIFSELPKRFAHEIELVRKQYPVEEFKLPKDGKMVRLTYKEGIEMLRAAGKEIGDFEDLSTENEKFLGKLVRDKYDTDFYILDKFPLEIRPFYTMPDPANPKYSNSYDFFMRGEEILSGAQRIHDHALLQERMKAHGLSPEDPGLKDYCDGFSYGCPPHAGGGIGLERVVMFYLDLKNIRRASLFPRDPKRLRP

SEQ ID NO: 2101 - protein, 305 aa, Haematococcus pluvialis
MLRSLLRGLTHIPRVNSAQQPSCAHARLQFKLRSMQMTLMQPSISANLSRAEDRTDHMRGASTWAGGQSQDELMLKDECILVDVEDNITGHASKLECHKFLPHQPAGLLHRAFSVFLFDDQGRLLLQQRARSKITFPSVWTNTCCSHPLHGQTPDEVDQLSQVADGTVPGAKAAAIRKLEHELGIPAHQLPASAFRFLTRLHYCAADVQPAATQSALWGEHEMDYILFIRANVTLAPNPDEVDEVRYVTQEELRQMMQPDNGLQWSPWFRIIAARFLERWWADLDAALNTDKHEDWGTVHHINEA

SEQ ID NO: 2102 - protein, 293 aa, Haematococcus pluvialis
MLRSLLRGLTHIPRVNSAQQPSCAHARLQFKLRSMQLLAEDRTDHMRGASTWAGGQSQDELMLKDECILVDADDNITGHASKLECHKFLPHQPAGLLHRAFSVFLFDDQGRLLLQQRARSKITFPSVWTNTCCSHPLHGQTPDEVDQLSQVADGTVPGAKAAAIRKLEHELGIPAHQLPASAFRFLTRLHYCAADVQPAATQSALWGEHEMDYILFIRANVTLAPNPDEVDEVRYVTQEELRQMMQPDNGLQWSPWFRIIAARFLERWWADLDAALNTDKHEDWGTVHHINEA

SEQ ID NO: 2103 - protein, 1529 aa, Arabidopsis thaliana
MSTAMVVESTSKSSEASPETTKPSYSSIVQNRPTLSKHEFNVTMVNGDSIVQVPNEIFEDSTPLWDDLLIGRFPQISPHIAKVHVIVNKIWPLGDKTVKIDAYVVDTKTIKFRIRESSVRARVLRRGMWNIADMPMIVSKWSPVAEDAQPEIKTMPMWITIKNVPRSMFTWKGLSFLASPIGEPKKLHPDTVLCNSFEEAKVFVEADLTQEMPKQFRFKSETGVDAMVEYKYPWLPPRCSSCSKWGHIQEVCLTRPSPNQLSTPTEIETEDKTEPPLMKEKPLEILSKSPSATLTKTLNGDSHTQKVPMKNPTVLQNKGKEVAEENEENLKDEGPWHTVSPAKVGRQRSPQPQEVVNHASPSRFDVLAVEEDTADTNGHEEGEIVVLSQQLNDNSDSVGVQGTRPYIPRISKSQHKVVKSSANQNTKGRIWVVWRDNARLTPVFKSSQMITCSILLEGKEEEFFCSFIYASNFVEERRILWEDIRSHHDSPLIRNKPWILCGDFNEILEGGEHSNYDNSPYTPPGMRDFQEIGRLMLEAAATGGRKPFKFVNVLTKLPQFLPVVESHWASSAPLYVSTSALYRFSKKLKTLKPHLRELGKEKLGDLPKRTREAHILLCEKQATTLANPSQETIAEELKAYTDWTHLSELEEGFLKQKSKLHWMNVGDGNNSYFHKAAQVRKMRNSIREIRGPNAETLQTSEEIKGEAERFFNEFLNRQSGDFHGISVEDLRNLMSYRCSVTDQNILTREVTGEEIQKVLFAMPNNKSPGPDGYTSEFFKATWSLTGPDFIAAIQSFFVKGFLPKGLNATILALIPKKDEAIEMKDYRPISCCNVLYKVISKILANRLKLLLPSFILQNQSAFVKERLLMENVLLATELVKDYHKESVTPRCAMKIDISKAFDSVQWQFLLNTLEALNFPETFRHWIKLCISTATFSVQVNGELAGFFGSSRGLRQGCALSPYLFVICMNVLSHMIDEAAVHRNIGYHPKCEKIGLTHLCFADDLMVFVDGHQWSIEGVINVFKEFAGRSGLQISLEKSTIYLAGVSASDRVQTLSSFPFANGQLPVRYLGLPLLTKQMTTADYSPLIEAVKTKISSWTARSLSYAGRLALLNSVIVSIANFWMSAYRLPAGCIREIEKLCSAFLWSGPVLNPKKAKIAWSSICQPKKEGGLGIKSLAEANKVSCLKLIWRLLSTQPSLWVTWIWTFIIRKGTFWSANERSSLGSWMWKKLLKYRELAKSMHKVEVRNGSSTSFWYDHWSHLGRLLDITGTRRVIDLGIPLETNLETVLRTHQHRQHRAAIYNRINAEIQRLQQQEREAGPDISLWRSLKNDFNKRFITKVTWNNVRTHQPQQNWYKGVWFPYSTPKYSFLLWLTVQNRLSTGDRIKAWNSGQLVTCTLCNNAEETRDHLFFSCQYTSYVWEALTQRLLSTNYSRDWNRLFTLLCTSNLPRDHLFLFRYVFQASIYHIWRERNARRHGEISSPTNRLIKLIDKTVRNRISSIRDTGDHNYNDCMQLWFSMRQPHSSPQPL

SEQ ID NO: 2104 - protein, 344 aa, Nitrobacter vulgaris
MSQELTLQQRMDGEAGSDPLRQAVKEAVAALARAAVDISDLTCRGALAGITGQAQGRNTDGDIQKDLDVRADQIIRDALGKLPIAALASEEMADLDILNPAAPICVAFDPLDGSSNINTNMSVGTIFSIMPTPSDVNAAFRQAGSAQLAAGFVVYGPQTSLVLTLGRGVDIFTLDRADRVFKLTGSSVQIPTDANEFAINASNRRHWDLPVRAYIDECLAGADGPCGKNFNMRWIGSLVAEAFRILIRGGIFLYPGDARDGYEEGRLVVYEAHPMAFIVEQAGGGASTGRKRVLDIVPDSLHQRVPLIMGSIKNVQRLEHMHTVPDVALEANAPLFGNRGLFRV

SEQ ID NO: 2105 - protein, 495 aa, Saccharomyces cerevisiae
MTTDNAKAQLTSSSGGNIIVVSNRLPVTITKNSSTGQYEYAMSSGGLVTALEGLKKTYTFKWFGWPGLEIPDDEKDQVRKDLLEKFNAVPIFLSDEIADLHYNGFSNSILWPLFHYHPGEINFDENAWFGYNEANQTFTNEIAKTMNHNDLIWVHDYHLMLVPEMLRVKIHEKQLQNVKVGWFLHTPFPSSEIYRILPVRQEILKGVLSCDLVGFHTYDYARHFLSSVQRVLNVNTLPNGVEYQGRFVNVGAFPIGIDVDKFTDGLKKESVQKRIQQLKETFKGCKIIVGVDRLDYIKGVPQKLHAMEVFLNEHPEWRGKVVLVQVAVPSRGDVEEYQYLRSVVNELVGRINGQFGTVEFVPIHFMHKSIPFEELISLYAVSDVCLVSSTRDGMNLVSYEYIACQEEKKGSLILSEFTGAAQSLNGAIIVNPWNTDDLSDAINEALTLPDVKKEVNWEKLYKYISKYTSAFWGENFVHELYSTSSSSTSSSATKN

SEQ ID NO: 2106 - protein, 637 aa, Adiantum capillus-veneris
MACTIVWFRRDLRVEDNPALVAAVRAGTVVPLFIWTPEEEGQFLPGRVSRWWLKQSLIQLHQSLTSLGSPLIMRRAQSAISVLSQIIKQTGATQVFFNHLYDPVSLVRDHKVKQELLQAGVTVTTFNADLLYEPWEINDEQGRPFTTFAGFWSLCMDMAIEPEAPLLPPKRITKWPGIAATSPIEDLELENESEKGSNDLLARAWAPGWANADRALEAFVSGPLMEYASNRQKVDSATTSLLSPHLHYGELSVRKVFHSVRMKQVLWVKEGNADAEESVNLFLRSIGLREYSRYLCFNFPFTHERSLLSNLKFFPWRNDEGYFKVWRQGRTGYPLVDAGMRELWATGWLHNRIRVIVSSFFVKFLQLPWRWGMKYFWDTLLDADLESDVLGWQYISGSLPDGHELYRIDNPQLEGYRYDPCGEYVRRWLPELSRLPSEWIHHPWDAPPNVLRAAGIELGSNYPRPIVEVAAARERLEQALAEMMEKEAAATRAAFEGSLQGVGLEPSQADNMDIDRGPSDAPGRNLSDRSPHDQMVPSMFMETGRPAADGVGSHASERGANVQEAHDNGSAPVASREGGSCRRNWQPFKVGTVTPTLLRSHHLRTGITLSLPLQVYQLGRAIGHLIQLCIRMTLRYL

SEQ ID NO: 2107 - protein, 679 aa, Adiantum capillus-veneris
MAAHTIVAHTIVWFRRDLRIEDNPALVAAVRAGPVLPVFIWSPEEEGQFLPGRVSRWWLKQSLVHLNESLTILGAPLVMRRASNVLAALLEIKKATGATQVFYNHLYDPVSLVRDHRVKQGLSQAGIIVNSFNADLLYEPWEVNDDNGQAFTTFSGFWAKCMDMPAEPEAQILPPKRILKFPGPSLSCSIEDLDLEDELEKGSNALLARAWQPGWANADRALESFINGSLMEYAANRQKVDSATTSLLSPHLHYGEVSVRKIFHNVRMKQVLWVKEGRVEAEESVNLFLRSIGFREYSRYLSFNFPFTHERSLLYNLKFFPWRVDESYFKAWRQGRTGYPLVDAGMRELWATGWLHNQIRVIVSSFCVKFLQLPWRWGMKYFWDTLLDADLESDVLGWQYISGSLPDGHELDRIDNPQIEGYKFDPYGEYVRRWLPELSRLPTEWIHHPWDAPPSVLRAAGIELGSNYPRPIVEIAAARERLEQALAEMWANEAADKATLANGLEEGLGDTVEVQGMRNGFPANMDIDRGPGEKALLVRSPHDQMVPNVGVRRSTTGAVQGGAANQGSALQAVLREVPANGHVQAVQAQSQRMAAPPMAMQNGYDDTHSTAESTSARHWSLAIGLPVWSQYVPVCLHMRQDDSQVPLVPDLHHGVMSRRLPHAPPMVNFEATKTSSLSV

SEQ ID NO: 2108 - protein, 718 aa, Adiantum capillus-veneris
MAKSCTVVWFRRDLRLEDNPALAAAARAGAVVPVFIWSPDEEGQFRPGRVSRWWLKQSLIQLDISLRSLGVSLVMINANDTVSALLELVKTTGASQVVYNHLYDPVSLVRDHRVKQSLVQNGIQVQSFNGDLLYEPWEVLDDHGKPFTYFESYWAKCLTMPFEPESPLLPPRRLTAAPAGIVHSLTPDELGLEDEADKSSNALLARAWAPGWSNADKALEAFLAGPFLNYSRNRHEIDGPTTSLLSPHLHFGEVSVRKVFHSVRRLQVLWAKDGSMLGEESINYFMRSIGFREYSRYLCFNFPFTHERSLLSNLKSFPWRVDEGLFKAWRQGRTGYPLVDAGMRELWATGWLHNRVRVIVSSFCVKFLQLPWRWGMKYFWDTLLDADLESDILGWQYISGSLPDGHELDRMDNPQTEGYKHDPLGEYVRRWLPELVRLPTEWIHHPWDAPPGVLRAAGVELGSNYPRPVVEVAAARERLRDAVTHMWEQEAALKAAGDKGIEEASVGDSIAKVNCQPEVAAQPCKIPKASVSQATNGDMEVSSAGSSRRDQMVPTFAKELKTQADALCGDYGSIALPLPSQQNLPCPSTNFSAIRGVSKLSPGNRGDMVDTTEALRNTHSEPLPPVSDTNPMTESSSSSSPREQISSIKDDPPMIWVPAIAHQRPSSDFGCVPYAGDAEQLRKHLLILQNARTDDKVEDGVQLNGSQWARGSKRKAKS

SEQ ID NO: 2109 - protein, 690 aa, Allium cepa
MSSDDLESPPSSYLPIPPSDEFHDQPPPLRSWLRLLSIPLALMFLLFLATFLSNLESPPSDSGLVSDPVTFDVNPAVVRRGKDAGVSDKTSGVDSGFVLDPVAVDANSVVVHRGKDAGVSDKTSGVDSGLLKDSPLGPYPWTNQMLSWQRTGFHFQPVKNWMNDPNGPLYYKGWYHFFYQYNPEGAVWGNIAWGHAVSRDLVHWTHLPLAMVPDQWYDINGVWTGSATILPDGQIVMLYTGATNESVQVQNLAVPADQSDTLLLRWKKSEANPILVPPPGIGDKDFRDPTTAWYEPSDDTWRIVIGSKDSSHSGIAIVYSTKDFINYKLIPGILHAVERVGMWECVDFYPVATADSSHANHGLDPSARPSPAVKHVLKASMDDDRHDYYAIGTYDPAQNTWVPDDASVDVGIGLRYDWGKFYASKTFYDHAKKRRILWSWIGETDSETADIAKGWASLQGVPRTVLLDVKTGSNLITWPVVEIESLRTRPRDFSGITVDAGSTFKLDVGGAAQLDIEAEFKISSEELEAVKEADVSYNCSSSGGAAERGVLGPFGLLVLANQDLTEQTATYFYVSRGMDGGLNTHFCQDEKRSSKASDIVKRIVGHSVPVLDGESFALRILVDHSIVESFAQGGRASATSRVYPTEAIYNNARVFVFNNATGAKVTAQSLKVWHMSTAINEIYDPATSVM

SEQ ID NO: 2110 - protein, 488 aa, Capsicum chinense
MSSITSSCYSNLILKKKESRINGGFHLQYNGLRAIESVQMPASSVAYKPKVVKWGRIRVMASPAVSAPKRETDPKKRIVITGMGLVSVFGSDIDNFYNKLLEGQSGISLIDRFDASSYTVRFAGQIRDFSSEGYIDGKNDRRLDDCWRYCLVAGKRALEDANLGQQVLDTMDKTRIGVLVGSSMGGSKVFADAVEALVQRGYKKINPFFIPYSITNMGSALLAIDTGLMGPTYSISTACATANYCFYASANHIRRGEADIMVAGGTDAFISAIGVGGLIACRALSQRNDEYEKASRPWDRNRDGFVIGEGSGVLVMENLEHALKRGAPIIAEYLGGAITCDAHHITDPRADGLGVSSCIVMSLVDAGVSPEEVNYINAHATSTLAGDLAEVNAIKKVFKDTSEIKMNGTKSMIGHGLGASGGLEAIATIKAITTGWLHPTINQYDLEPQVTIDTVPNVKKQHEVNVGISNSFGFGGHNSVVVFAPYKP

SEQ ID NO: 2111 - protein, 705 aa, Arabidopsis thaliana
MEKKALTTAESVRVVEKHPWVITFPNHEDLTFLFDPLERKRYTLNLPELVGTDVCYSKDGWLLMRRSSLVDMFFFNPYTRELINLPKCELAFQAIAFSSAPTSGTCVVLALRPFTRYIIRISICYPGATEWITQEFSCSLRFDPYMHSNLVYANDHFYCFSSGGVLVDFDVASRTMSEQAWNEHRCAYMRNDNAEWFNLPKRIYLAEQKGELFLMYTCSSEIPMNINDIPQPRDLMITVDHKSDTVLLPIYGRMVPFNVTTIRTVLGNQNTIRVIFNVPGTPLNPNDSLKNKDAIYLKEVSFRTKDSRHSSDVVQQVKSLRRKVMARESERAERTSLVNQEKLQIVRNNSKPLSLSNLWIRPPFSGRKKNRGTLEAHVNGFRYSTTNERVDVLFANIKHAFFQPAEKEMTTLLHFHLHNHIMVGTKKTKDVQFYVEVMDVVQSLGGRRRSSAYDADEIVEEQRERDRKNKINMDFNHFANQVNDMWQLPQFASLSLEFDQPLREFGFNGVPHKTSTFIIPTSSCLVELTESPFLVVCLSEIEIVNLERVGFGQKSFDMAIIFKDLKKDVLRVDSVPTNAGGWEFLNQDGSDSESGGSEDSDKGYEPSDVEVESESEDETSESESDDEEEEEDSEQESEEEKGKTWAELEREATNADREHGVESDSEEERKRRKMKAFGKSRPGSSGAGGSSSMKNMPPSKRSRHR

SEQ ID NO: 2112 - protein, 294 aa, Pisum sativum
MEQYEKVEKIGEGTYGVVYKARDRVTNETIALKKIRLEQEDEGVPSTAIREISLLKEMQHRNIVRLQDVVHSEKRLYLVFEYLDLDLKKHMDSSPEFSKDQRQVKMFLYQILCGIAYCHSHRVLHRDLKPQNLLIDRSSNALKLADFGLARAFGIPVRTFTHEVVTLWYRAPEILLGSRHYSTPVDVWSVGCIFAEMINQRPLFPGDSEIDELFKIFRITGTPNEDTWPGVTSLPDFKSAFPKWPSKDLATLVPSLEPSGLDLLSSMLRLDPSRRITARGALEHEYFKDIKFVP

SEQ ID NO: 2113 - protein, 164 aa, Saccharum hybrid
  misc_feature (59)..(59): Xaa can be any naturally occurring amino acid
  misc_feature (132)..(132): Xaa can be any naturally occurring amino acid
YNPDGAIWGNKIAWGHAVSRDLIHWRHLPLAMVPDQWYDTNGVWTGSATTLPDGRLAMXYTGSTNASVQVQCLAVPADDADPLLTNWTKYEGNPVLYPPPGIGPKDFRDPTTAWFDPSDNTWRIVIGSKDDXEGDHAGIAVVYRTRDFVHFELLPDLLHRVAGT

SEQ ID NO: 2114 - protein, 366 aa, Emericella nidulans
MTSQRPTSSSSSLLDIVANLASPKSLLFNAHHTNPPPSLPSQRAPTMDKSQQPSSFQQLEKLGEGTYATVFKGRNRQTGELVALKEIHLDSEEGTPSTAIREISLMKELKHESIVSLYDVIHTENKLMLVFEYMDKDLKKYMDTRGDRGQLDQATIKSFMHQLMSGIAFCHDNRVLHRDLKPQNLLINKKGQLKLGDFGLARAFGIPVNTFSNEVVTLWYRAPDVLLGSRTYNTSIDIWSAGCIMAELYTGRPLFPGTTNEDQLQKIFRLMGTPSERSWPGISQLPEYRANFHVYATQDLGLILPQIDPLGLDLLNRMLQLRPEMRIDAHGALQHPWFHDLPQLQAQLQQQQMAGYGGMMPPQQAY

SEQ ID NO: 2115 - protein, 320 aa, Emericella nidulans
MDKSQQPSSFQQLEKLGEGTYATVFKGRNRQTGELVALKEIHLDSEEGTPSTAIREISLMKELKHESIVSLYDVIHTENKLMLVFEYMDKDLKKYMDTRGDRGQLDQATIKSFMHQLMSGIAFCHDNRVLHRDLKPQNLLINKKGQLKLGDFGLARAFGIPVNTFSNEVVTLWYRAPDVLLGSRTYNTSIDIWSAGCIMAELYTGRPLFPGTTNEDQLQKIFRLMGTPSERSWPGISQLPEYRANFHVYATQDLGLILPQIDPLGLDLLNRMLQLRPEMRIDAHGALQHPWFHDLPQLQAQLQQQQMAGYGGMMPPQQAY

SEQ ID NO: 2116 - protein, 469 aa, Yarrowia lipolytica
MPNVLVISNRLPVTISREEDGTYKYTMSSGGLVTALSGLKQSTTFQWFGWPGLEIPEKDKPRLINDLETMFSCVPVFMDDDLADLHYNGFSNSILWPLFHYHPGEMNFDQVAWEAYTQANRLFAKKVASIVKPGDIVWVHDYHLMLLPEMLREECENNSALDGLKIGFFLHTPFPSSEIYRILPVRKEVLTGVLSCNLIGFHTYDYARHFLSSVSRILDLETMPNGTYYKGRHVVVGAFPIGIDVNKFLEGCKRPAVQERIAQLQDKFKGIKVVVGVDRLDYIKGVPQKLHAFEVFLSEHPEWIGKVVLVQVAVPSRGLVEEYQNLRAVVNELVGRINGMFGTVEFTPIHFMHRSVDFNELIALYSISDVCFVSSTRDGMNLVSYEYVACQTEKHGSLILSEFTGAAQSLNGALIVNPWNTEDMAEALYDSLTFSPEKKAENHRKLFKYVSKYTSQHWGEAFVSELKRC

SEQ ID NO: 2117 - protein, 640 aa, Vibrio harveyi
MGKIIGIDLGTTNSCVAVLDGDKPRVIENAEGERTTASVIAYTDGETLVGQPGGNVNAVTNPTRYTLFAIKRLIGRRFEDEEVQRDIEIMPYKIVKADNGDAWVEAKGQKMAAPQVSAEVLKKMKKTAEDFLGEEVTGAVITVPAYFNDAQAQATKDAGRIAGLEVKRIINEPTAAALAYGLDKSGGDRTIAVYDLGGGTFDISIIEIDEVEGEKTFEVLATNGDTHLGGEDFDNRLINYLVDEFNKEQGINLKNDPLAMQRVKEAAEKAKIELSSTSQTDVNLPYVTADATGPKHMNIKVTRAKLESLVEDLVQRSLEPLKVALADADLSVNDITDVILVGGQTRMPMVQAKVAEFFGKEARRDVNPDEAVAMGAAVQGGVLAGEVKDVLLLDVTPLSLGIETMGAVMTKLVEKNTTIPTKANQVFSTAEDNQSAVTIHVLQGERKQASFNKSLGQFNLEGIQAAPRGMPQIEVTFDLDADGILHVSAKDKQTGKEQKITIQASGGLSDDDIEKMVQEAEANKEADKKFEELATARNQADQMIHGTRKQVEEAGEALPAEEKEKIEAAISELETARKGDDKEAIDAKVQALMTAAQKLMEIAQQQAQAQQAQGGYAGAQQSQEDDVVDAEFEEVKDDKK

SEQ ID NO: 2118 - protein, 1012 aa, Chenopodium rubrum
MKMEDLFSLLPWLRDVPVQNQFSLDDKMYSDALKLFTESKSILSNNVSPIGSTTPEELERYMFAFILYASKRLGAKTTGDASEGSNQSGITLCQKLKAVKLNLVDFFKELPQFVVKIGPILSDMYGADWEKRLEAKELQANFVHLSLLSKYYKRAYQEFFKTNEVDKEVADPGTSSSDSISDYYRFGWLLFLALRVHAFSRFKDLVTCTNGIVSVLAILIIHIPARLRKFSALDLPLFEKKIDRGVNLVASLCQKYDTSEDEVKHMMEKANELILEILKKNPCSASLCKTENLENIDPDDLTYFEDLLEDSSLPNCISMLEKDYDAAIWNKGDIDERVFVNVDDSLLGSGSLSGGAINISGLREIRCNGLFNETIASPLSPCRSPALHVNGARGGVNIRMISTPVSTAMTTAKWLRTYISPLPSKPSPQLEKYLMSCDRNISSEVVRRAHIIMEAIFPNSALGERCIAGSLPNSNLTDNIWAQQRRLEALKLYYRVLETMCTAEAQLLHANNLTSLLTNERFHRCMLACSAELVLATHKTVTMLFPAVLEKTGITAFDLSKVIESFIRHEDSLPRELRRHLNSLEERLLESMAWEKGSSMDNSLIIARPALSAGINRFGLLAEPMPFLNAMAAHIEVSTGGLPPLPSSCKHEFAAGQNGDIRSPKRACTEYRSVLVERNSFTSPVKDRLINNLKQKLTPPALQSAFASPTRLSPGGGGETCAETGINIFFSKIVKLAAVRINGMIERLEKLEKQSQTQQLREQLRENVYCRFHIILNQRTSLFFNRHIDQIILCAFYGVAKISQYELTFKEIILNYRKQPQCKPQVFRSVFVDWSFSRRNRQGQDHVDIITFYNEVFIPSVKPLLGELGPQGACVKTDLIPESNNDKDGQCPGSPKLSTFPSLPDMSPKKVAKNVYVSPLRSSKMDALISNSSKSYYACVGESTHAFQSPSKDLTAINDRLNSTSKVRGALNFDTDAGLVSDSLVANSLYLQNGNCATTSSVGPLKTEQPDS

SEQ ID NO: 2119 - protein, 759 aa, Schizosaccharomyces pombe
MNFEEIEERDGVRFTWNVFPSTRIESSRTIVPIASIYKPLNERPDLPPVLYEPVTCKAPCKAVLNPYCHIDTRAKFWICPFCLQRNMLPPQYKDISNTSLPIELLPEYSTIEYTLPRPPQLTPVFLFVVDVCQDEENLQALKDSLIISLSLLPPECLVGLVTFGTMVDVYELGYTECSKSYVFRGSKDYTSKQIQEMLGLPTSNVSPVALQQARSFQGSAAPSRFLLPIQQCEFQLTNILEQLQPDSWPVANDRRPQRCTGTALNISVSMMESVCPNSGGHIMLFAGGPSTVGPGTVVSTELREPIRSHHDIERDQAKHVKKALRFYEGLTKRVSANGHAVDILAGCLDQIGIMEMKSLASSTGGYLVLSDSFTTSIFKQSFQRIFGRDSLNNMLLGFNATMEVLTTKELKISGLIGHAVSLNKKSQNVGDIEIGLGNTNSWKMCGISPKSTYAIYFEVATQSASAPQGDSRGLVQYLTLYQHSSNTFRLRVTTVARAFADGGSPLIVNSFDQEAAAVAMARIAAFKAEVDDGPDVLRWTDRMLIKLCQKFAEYRKDDPSSFRLSSQFTLYPQFMYYLRRSPFLQVFNNSPDETAFYRHMLNHEDVNNSLIMIQPTLQSFSFEHPGGVPVLLDAVSVKPDVILLLDTFFHILIFHGDTIAQWRNAGYQNQPEYQNLKELLEAPRVEAAELLIDRFPIPRFIVCDQGGSQARFLLSRLNPSETHNTTSMYGAPPAHAILTDDVSLQTFMSHLKKLAVAVS

SEQ ID NO: 2120 - protein, 1216 aa, Arabidopsis thaliana
MDLVSSLPDELLYQILSFLNTKEAALTSILSKRWRYLIAFVSCIEIDDSANKPKRKGNRQRFMDFVDRVLALQGDSPNKKFSLKCQTDVGDRNNKTFHRAITTREAVNSIREIVTRDGLVVTSQQDIQTEAVNYFQDFLQTIPADYEGMCVEELENLLPFRCSEDDHRLLTRVVTGEEIKKVIFSMPKDKSPGPDGYTSEFYKASWEIIGDEVIIAIQSFFAKGFLPKGVNSTILALIPKKKEAREIKDYRPISCCNVLYKAISKILANRLKRILPKFIVGNQSAFVKDRLLIENVLLATELVKDYHKDSISTRCAMKIDISKAFDSLQWSFLTHVLAAMNFPGEFIHWISLCMSTASFSIQVNGELAGYFRSARGLRQGCSLSPYLFVISMDVLSRMLDKAAGAREFGYHPRCKTLGLTHLCFADDLMILTDGKIRSVDGIVKVLNQFAAKLGLKICMEKTTLYLAGVSDHSRQLMSSRYSFGVGKLPVRYLGLPLVTKRLTTSDYSPLIDQIRRRIGMWTSRYLSFAGRLSLINSVLWSITNFWMNAFRLPRECINEINRISSALLWSGPELNPKKAKVSWDEICKPKKEGGLGLQSLREANKVSSLKLIWRLLSCQDSLWVKWTRMNLLKKESFWSIGTHSTLGSWIWRRLLKHREVAKSFCKIEVNNGVNTSFWFDNWSEKGPLINLTGARGAIDMGISRHMTLAEAWSRRRRKRHRVEILNEFEEILLQKYQHRNIELEDAILWRGKEDVFKARFSTKDTWNHIRTSSNQRAWHKGVWFAHATPKFSFCAWLAIRNRLSTGDRMMTWNNGTPTTCVFCSSPMETRDHLFFQCCYSSEIWTSIAKNVYKDRFSTKWSAVVNYISDSQPDRIQSFLSRYTFQVSIHSIWRERNSRRHGEKSRSASNLIRQIDKTIRNQLSTIKKKGDLRLEKGLQTLILDSIRFDSGQFQSLLSACPVLEALDLANVRCLYRNHEIETVSSASLKNVTMKCSRVYLFDTPNLVCLNYTAFVHDNFPLVNLEYLVDAQIKLLSIRKNHVFPNLGNVRKLMHTVTNVKKLYLSPRTLGIVLGLCSHAMPVFNNLTYLAIETSVDTAWQAMPVLLKTCSHLETLVIKGGLLHCVTFDCGDACNCISREEKCRSLASFPVKRLEIREFQGQLREKNMIKHFLYYLPCLKEMDIYVKDDLPQLSSDSNLFNDLSGRPNVKIKVHGSLT

SEQ ID NO: 2121 - protein, 495 aa, Saccharomyces cerevisiae
MTTDNAKAQLTSSSGGNIIVVSNRLPVTITKNSSTGQYEYAMSSGGLVTALEGLKKTYTFKWFGWPGLEIPDDEKDQVRKDLLEKFNAVPIFLSDEIADLHYNGFSNSILWPLFHYHPGEINFDENAWLAYNEANQTFTNEIAKTMNHNDLIWVHDYHLMLVPEMLRVKIHEKQLQNVKVGWFLHTPFPSSEIYRILPVRQEILKGVLSCDLVGFHTYDYARHFLSSVQRVLNVNTLPNGVEYQGRFVNVGAFPIGIDVDKFTDGLKKESVQKRIQQLKETFKGCKIIVGVDRLDYIKGVPQKLHAMEVFLNEHPEWRGKVVLVQVAVPSRGDVEEYQYLRSVVNELVGRINGQFGTVEFVPIHFMHKSIPFEELISLYAVSDVCLVSSTRDGMNLVSYEYIACQEEKKGSLILSEFTGAAQSLNGAIIVNPWNTDDLSDAINEALTLPDVKKEVNWEKLYKYISKYTSAFWGENFVHELYSTSSSSTSSSATKN

SEQ ID NO: 2122 - protein, 505 aa, Hordeum vulgare
MAGNMLANYVQVYVMLPLDVVSVDNKFEKGDEIRAHVKKLTEAGVDGVMIYFWWGLVEGIGPKAYHWTPYNHVFYLVHDARLQLQAIMSFHQCGGNVGDLFNIPIPQWVRDVGATDPDIFYTNRRGTRNIDYLTLGVDDQPLFHGRTAVQMYHDYMASFRENMKKFLDAGTIVDIEVGLGPAGEMRYPSYPQSQGWVFPGIGEFICYDKYLEADFKAAAAKAGHPEWELPDDAGEYNDTPEKTQFFKENGTYLTEKGKFFLSWYSNKLIKHGDKILDEANKVFLGCRVHLAIKISGIHWWYRVPNHAAELTAGYYNLDDRDGYRTIARMLTRHHASMNFTCAEMRDSEQSEEAKSAPEELVQQVLSAGWREGLHVACENALSRYDATAYNTILRNARPKGINENGPPEHKLFGFTYLRLSNELLKGQNYATFQTFVEKMHANLAHNPSVDPVAPLEKSKPEMPIELILKAAQPKLEPFPFDKNTDLPVKNHTDVVDEALLAPVAV

SEQ ID NO: 2123 - protein, 535 aa, Hordeum vulgare
MEVNVKGNYVQVYVMLPLDAVSVNNRFEKGDELRAQLRKLVEAGVDGVMVDVWWGLVEGKGPKAYDWSAYKQLFELVQKAGLKLQAIMSFHQCGGNVGDAVNIPIPQWVRDVGTRDPDIFYTDGHGTRNIEYLTLGVDNQPLFHGRSAVQMYADYMTSFRENMKDFLDAGVIVDIEVGLGPAGEMRYPSYPQSHGWSFPGIGEFICYDKYLQADFKAAAAAVGHPEWEFPNDVGQYNDTPERTQFFRDNGTYLSEKGRFFLAWYSNNLIKHGDRILDEANKVFLGYKVQLAIKISGIHWWYKVPSHAAELTAGYYNLHDRDGYRTIARMLKRHRASINFTCAEMRDLEQSSQAMSAPEELVQQVLSAGWREGLNVACENALPRYDPTAYNTILRNARPHGINQSGPPEHKLFGFTYLRLSNQLVEGQNYVNFKTFVDRMHANLPRDPYVDPMAPLPRSGPEISIEMILQAAQPKLQPFPFQEHTDLPVGPTGGMGGQAEGPTCGMGGQVKGPTGGMGGQAEDPTSGMGGELPATM

SEQ ID NO: 2124 - protein, 1449 aa, Arabidopsis thaliana
MLPAAAPPGLSGEVPLREGSPVSSPVSLERQDGDLIVSNQSTYRVLLVSDSDQFPALSQSALETTQRMSHPPAKKSWVNAARKHTFTQQKFVSEEVDGQATVVVPKEVFLGAKPLWEDFLIGHFLNAKAPHVGKIHMIVNKIWRLGDKSNLIDVYAVNDSTIKFRIRNEAMRRRALNRGMWNIMDLPMVVSKWSPFAEETQPAMKSIQLWITLTDVPPSLFTDKGLEFLASAVGKPIRLHPKTESCSSFDEAQLLVEADLTKELPKEFVFTGEEEGELAAVIKYSYPWLPPRCSCCDKWGHLRDSCLSALKTCSRDTPNPDPIHVEETETGQVLSNSQTAASVTAECVTENIPIIPISEDGKEEEKGAESWITPKFGRSPPKKQEGLQFGEVSILSNSYSALNGKDESGEDIITADSVEKQAEETQNSTQDPPQEKKWVDEQNFQFGCLIETRVKEENSQWLGSKLFKDWSMLTNYEFNRRGRLWVVWRENVRFTPFYKSDQLITCSVKLESQEEEFFYSFVYASNFAEERKILWNDLRDHMDSPIIRDKPWIIFGDFNEILDMDEHSRMEDHPAVTSGMRDFQSLVNYCSFSDLASHGPLFTWCNKRDNDPIWKKLDRVMVNEAWKMVYPQSYNVFEAGGCSDHLRCRINLNMNSGAQVRGNKPFKFVNAVADMEEFKPLVENFWRETEPIHMSTSSLFRFTKKLKALKPKLRGLAKEKMGNLVKRTREAYLSLCQAQQSNSQNPSQRAMEIESEAYVRWDRIASIEEKYLKQVSKLHWLKVGDKNNKTFHRAATARAAQNSIREIQKEDGSTATTKDDIKNETERFFQEFLQLIPNDYEGITVEKLTSLLPYHCSPAEKDMLTASVSAKEIRGALFSMPNDKSPGPDGYTSEFYKRAWDIIGAEFVLAVKSFFEKGFLPKGVNTTILALIPKKLEAKEMKDYRPISCCNVIYKVISKIIANRLKHVLPNFIAGNQSAFVKDRLLIENLLLATELVKDYHKDTISGRCAIKIDISKAFDSVQWSFLKNVLSALDFPPEFVHWVMLCVTTASFSVQVNGELAGYFQSSREQLKKKIGSWTARFLSYAGRLNLISSVLWSICNFWLAAFRLPRKCIREIDKLCSTFLWSGPDLNSHKAKVAWDDVCKPKKEGGLGLRSIKEANDDMAKQFCKKEVNTGRNTFFWYDDWSTLGRLVEIAGDRGTIDMGISRKMTLEEAWNGRRQRRHRDNVLNQMEEALELTRQRRNGNDDVTLWKGKNDDYRHCFSTKETWNNTRTMGIEVPWHKGVWFTHSTPKFSFCVWLAVYDRLSTGDKMLLWNRGLQGTCLLCRNATESRDHLFFSCSFSSEVWEMSAKSIYKSSYSTDWRHLLTKIQENWKDRVESFIARYIFQVSVYAIWRERNRRKHGRNPNQAAQLVRWIDKQIRDQLSAIKLMGDRRYDQGFQFWLKSSS

SEQ ID NO: 2125 - protein, 293 aa, Haematococcus pluvialis
MLRSLLRGLTHFPRVNSAQQPSCAHARLQFRPRSMQLLAEDRTDHMRGASTWAGGQSQDELMLKDECILVDADDNITGHVSKLECHKFLPHQPAGLLHRAFSVFLFDDQGRLLLQQRARSKITFPSVWTNTCCSHPLHGQTPDEVDQLSQVADGTVPGAKAAAIRKLEHELGIPAHQLPASAFRFLTRLHYCAADVQPAATQSALWGEHEMDYILFIRANVTLAPNPDEVDEVRYVTQEELRQMMQPDNGLQWSPWFRIIAARFLERWWADLDAALNTDKHEDWGTVHHINEA

SEQ ID NO: 2126 - protein, 546 aa, Cuphea pulcherrima
MPAASSLLASPLCTWLLAACMSTSFHPSDPLPPSISSPRRRLSRRRILSQCAPLPSASSALRGSSFHTLVTSYLACFEPCHDYYTSASLFGSRPIRTTRRHRRLNRASPSREAMAVALQPEQEVTTKKKPSIKQRRVVVTGMGVVTPLGHDPDVFYNNLLDGTSGISEIETFDCAQFPTRIAGEIKSFSTDGWVAPKLSKRMDKFMLYMLTAGKKALTDGGITEDVMKELDKRKCGVLIGSAMGGMKVFNDAIEALRISYKKMNPFCVPFATTNMGSAMLAMDLGWMGPNYSISTACATSNFCIMNAANHIIRGEADVMLCGGSDAVIIPIGMGGFVACRALSQRNSDPTKASRPWDSNRDGFVMGEGAGVLLLEELEHAKKRGATIYAEFLGGSFTCDAYHMTEPHPDGAGVILCIEKALAQSGVSREDVNYINAHATSTPAGDIKEYQALIHCFGQNRELKVNSTKSMIGHLLGAAGGVEAVSVVQAIRTGWIHPNINLENPDEGVDTKLLVGPKKERLNVKVGLSNSFGFGGHNSSILFAPYI

SEQ ID NO: 2127 - protein, 534 aa, Cuphea hookeriana
MATASCMVASPFCTWLVAACMPTSSDNDPRSLSHKRLRLSRRRRTLSSHCSLRGSTFQCLDPCNQQRFLGDNGFASLFGSKPLRSNRGHLRLGRTSHSGEVMAVAMQPAQEVSTNKKPATKQRRVVVTGMGVVTPLGHDPDVYYNNLLDGISGISEIENFDCSQFPTRIAGEIKSFSTDGWVAPKFSERMDKFMLYMLTAGKKALADGGITEDAMKELNKRKCGVLIGSGLGGMKVFSDSIEALRTSYKKISPFCVPFSTTNMGSAILAMDLGWMGPNYSISTACATSNFCILNAANHIIKGEADMMLCGGSDAAVLPVGLGGFVACRALSQRNNDPTKASRPWDSNRDGFVMGEGAGVLLLEELEHAKKRGATIYAEFLGGSFTCDAYHMTEPHPEGAGVILCIEKALAQSGVSREDVNYINAHATSTPAGDIKEYQALAHCFGQNSELRVNSTKSMIGHLLGGAGGVEAVAVVQAIRTGWIHPNINLEDPDEGVDAKLLVGPKKEKLKVKVGLSNSFGFGGHNSSILFAPCN

SEQ ID NO: 2128 - protein, 1019 aa, Schizosaccharomyces pombe
MAEYEIDEITFHKRLGILLTSWKNEEDGKTLFQDCDSILVTVGAHDDTNPYQKSTALHTWLLGYEFPSTLILLEKHRITILTSVNKANMLTKLAETKGAAADVNILKRTKDAEENKKLFEKIIEYIRATNKKVGVFPKDKTQGKFINEWDSIFEPVKSEFNLVDASLGLAKCLAIKDEQELANIKGASRVSVAVMSKYFVDELSTYIDQGKKITHSKFSDQMESLIDNEAFFQTKSLKLGDIDLDQLEWCYTPIIQSGGSYDLKPSAITDDRNLHGDVVLCSLGFRYKSYCSNVGRTYLFDPDSEQQKNYSFLVALQKKLFEYCRDGAVIGDIYTKILGLIRAKRPDLEPNFVRNLGAGIGIEFRESSLLVNAKNPRVLQAGMTLNLSIGFGNLINPHPKNSQSKEYALLLIDTIQITRSDPIVFTDSPKAQGDISYFFGEDDSSLEDGVKPRKPPTRGTATISSHKGKTRSETRDLDDSAEKRRVEHQKQLASRKQAEGLQRFAQGSVPSSGIEKPTVKRFESYKRDSQLPQAIGELRILVDYRAQSIILPIFGRPVPFHISTLKNASKNDEGNFVYLRLNFVSPGQIGGKKDELPFEDPNAQFIRSFTFRSSNNSRMSQVFKDIQDMKKAATKRETERKEFADVIEQDKLIEIKNKRPAHINDVYVRPAIDGKRLPGFIEIHQNGIRYQSPLRSDSHIDLLFSNMKHLFFQPCEGELIVLIHVHLKAPIMVGKRKTQDVQFYREVSDIQFDETGNKKRKYMYGDEDELEQEQEERRRRAQLDREFKSFAEKIAEASEGRIELDIPFRELAFNGVPFRSNVLLQPTTDCLVQLTDTPFTVITLNEIEIAHLERVQFGLKNFDLVFIFQDFRRPPIHINTIPMEQLDNVKEWLDSCDICFYEGPLNLNWTTIMKTVNEDPIAFFEEGGWGFLGAPSDDEGDDSVEEVSEYEASDADPSDEEEEESEEYSEDASEEDGYSESEVEDEESGEDWDELERKARQEDAKHDAFEERPSKKRHR

SEQ ID NO: 2129 - protein, 475 aa, Arabidopsis thaliana
MVGGFRVIHLVRPFLAFLPEVQSPERKIPFREKVIYTVISLFIFLVCSQLPLYGIHSTTGADPFYWMRVILASSRGTVMELGITPIVTSGMVMQLLAGSKIIEIDNNVREDRALLNGAQKLLGILIAVGQAVAYVLSGMYGSVGELGVGNAILIIVQLCFAAIIVLCLDELLQKGYGLGSGISLFIATNICESIIWKAFSPTTINSGRGAQFEGAVIALFHLLITRTDKVRALREAFFRQNLPNVTNLHATVLIFLIVIYFQGFRVVLPVRSKNARGQRGSYPIKLFYTSNMPIILQSALVSNIYFISQILYRKFGGNFLVNLIGTWKESEYSGQSIPVGGIAYYITAPSSLAEMATHPFHALFYLVFMLAACALFSKTWIEVSGSSAKDVARQLREQQMVMPGHRDSNLQKELNRYIPTAAAFGGLCIGALTVLADLMGAIGSGTGILLAVTIIYQYFETFEKEKASELGFFGL

SEQ ID NO: 2130 - protein, 426 aa, Rickettsia prowazekii
MSNQNINKRVVITGLGLVTPVGLNVSSTWKNIVGGVSGIKTITEFDTSKLACKIAGVIDNSEQNGFKLENFTQADDINRLSKMDKFIHYGIAAATEAVEDSGWLPKDEKSRDRTGLILGSGIGGLKMIEDTSIKLYKENNGKVSPFFIPASLINLLSGLVSIKYGFSGPNQAAVTACSTGAHAIGDAMRMIKHGYADVMIAGGAEAPVTPVGIAGFVAARALCTKYNDNPEKASRPWDKDRSGFVMGEGAGIVVLEEYEHAINRGAKIYCEVIGYGSTGDAYHMTAPHPKGRGAYRAMSEALQDADITPSMIDYINAHGTSTPLGDMIELDATQKLFLESNPKILMSSTKSSIGHLLGAAGSVEFIFSVLTIRDQIAPPTLNLENPIDDVKIDLVKFKARETVIDYVLSNSFGFGGTNASLVIKKI

SEQ ID NO: 2131 - protein, 860 aa, Brassica rapa
MKGVRNIYHHSYTSFLLVFVVMILFRPTLSIYFNTLSSTESLTISNSRTLVSPGDVFELGFFKTTSSSRWYLGIWYKKLPGRTYVWVANRDNPLSNSIGTLKISNMNLVILDHSNKSVWSTNHTRGNERSLVVAELLANGNFLMRDSNSNDAYGFLWQSFDYPTDTLLPEMKLGYDLKIGLNRSLTSWRSPDDPSSGYFSYKLEGSRRLPEFYLMQGDVREHRSGPWNGIQFIGIPEDQKSSYMMYNFTDNSEEVAYTFVMTNNGIYSRLKLSSDGYLERLTWAPSSGAWNVFWSSPNHQCDMYRMCGTYSYCDVNTSPSCNCIPGFNPKNRQQWDLRIPISGCKRRTRLSCNGDGFTRMKNMKLPDTTMAIVDRSMGVKECEKRCLSDCNCTAFANADIRNGGTGCVIWTGELEDMRNYAEGGQELYVRLAAADLVKKRNGNWKIISLIVGVSVVLLLLLLLLIMFCLWKRKQNRAKAMATSIVNQQRNQNVLMNTMTQSNKRQLSRENKADEFELPLIELEAVVKATENFSNCNELGRGGFGIVYKGMLDGQEVAVKRLSKTSLQGIDEFMNEVRLIARLQHINLVRILGCCIEAGEKILIYEYLENSSLDYFLFGKKRSSNLNWKDRFAITNGVARGLLYLHQDSRFRIIHRDLKPGNILLDKYMIPKISDFGMARIFARDETQVRTDNAVGTYGYMSPEYAMYGVISEKTDVFSFGVIVLEIVIGKRNRGFYQVNPENNLPSYAWTHWAEGRALEIVDPVILDSLSSLPSTFKPKEVLKCIQIGLLCIQERAEHRPTMSSVVWMLGSEATEIPQPKPPVYCLIASYYANNPSSSRQFDDDESWTVNKYTCSVIDAR

SEQ ID NO: 2132 - protein, 361 aa, Flavobacterium hydatis
GMDLGTTNSCVSVMEGNEAVVIPNAEGKRTTPSIIAFVEGGEIKVGDPAKRQAVTNPTKTIASIKRFMGHTFAETTNESKRVSYKVVKGVQQYSTVDIDGRLYTAQELSAMTLQKMKKTAEDYLGQTVTEAVITVPAYFNDAQRQATKEAGEIAGLKVMRIINEPTAAALAYGLDKKGTDQKIAIYDLGGGTFDISVLELGDGVFEVLSTNGDTHLGGDDFDHEIIDWLADEFKAEEGIDLRLDPMSLQRLKEAAEKAKIELSSSSETEINLPYVTATASGPKHLVKKLSRAQFEKLTDSLVKRSMEPVAKALKDAGLTTSDIDEVILVGGSTRMPRIADEVEKFFGKKASKGVNPDEAVA

SEQ ID NO: 2133 - protein, 424 aa, Escherichia coli
MTDKRKDGSGKLLYCSFCGKSQHEVRKLIAGPSVYICDECVDLCNDIIREEIKEVAPHRERSALPTPHEIRNHLDDYVIGQEQAKKVLAVAVYNHYKRLRNGDTSNGVELGKSNILLIGPTGSGKTLLAETLARLLDVPFTMADATTLTEAGYVGEDVENIIQKLLQKCDYDVQKAQRGIVYIDEIDKISRKSDNPSITRDVSGEGVQQALLKLIEGTVAAVPPQGGRKHPQQEFLQVDTSKILFICGGAFAGLDKVISHRVETGSGHWCWRSGKAKSDKASEGELLAQVEPEDLIKFGLIPEFIGRLPVVATLNELSEEALIQILKEPKNALTKQYQALFNLEGVDLEFRDEALDAIAKKAMARKTGARGLRSIVEAALLDTMYDLPSMEDVEKVVIDESVIDGQSKPLLIYGKPEAQQASGE

SEQ ID NO: 2134 - protein, 495 aa, Glycine max
ATSDSNMLLNYVPVYVMLPLGVVNVDNVFEDPDGLKEQLLQLRAAGVDGVMVDVWWGIIELKGPKQYDWRAYRSLLQLVQECGLTLQAIMSFHQCGGNVGDIVNIPIPQWVLDIGESNHDIFYTNRSGTRNKEYLTVGVDNEPIFHGRTAIEIYSDYMKSFRENMSDFLESGLIIDIEVGLGPAGELRYPSYPQSQGWEFPGIGEFQCYDKYLKADFKAAVARAGHPEWELPDDAGKYNDVPESTGFFKSNGTYVTEKGKFFLTWYSNKLLNHGDQILDEANKAFLGCKVKLAIKVSGIHWWYKVENHAAELTAGYYNLNDRDGYRPIARMLSRHHAILNFTCLEMRDSEQPSDAKSGPQELVQQVLSGGWREDIRVAGENALPRYDATAYNQIILNARPQGVNNNGPPKLSMFGVTYLRLSDDLLQKSNFNIFKKFVLKMHADQDYCANPQKYNHAITPLKPSAPKIPIEVLLEATKPTLPFPWLPETDMKVDG

SEQ ID NO: 2135 - protein, 406 aa, Oryza sativa
MAAAATTSSHLLLLSRQQAAASLQCGLSFRRQPGRLAGGSSAPSVRCMAAVDTASAPAATEASKKSSYEITTLTTWLLKQEQAGTIDGEMTIVLASISTACKQIASLVQRAPISNLTGVQGAVNVQGEDQKKLDVVSNEVFSNCLKSSGRTGVIASEEEDVPVAVEESYSGNYIVVFDPLDGSSNIDAAVSTGSIFGIYSPNDECLADIADDQNLDQVEQRCIVSVCQPGSNLLAAGYCMYSSSVIFVLTIGTGVYVFTLDPMYGEFVLTQEKVQIPKAGKIYAFNEGNYALWDDKLKSYMDSLKEPGPSGKPYSARYIGSLVGDFHRTLLYGGIYGYPRDQKSKNGKLRLLYECAPMSFIVEQAGGKGSDGHQRILDIMPTEIHQRVPLYIGSVEEVEKVEKFLA

SEQ ID NO: 2136 - protein, 507 aa, Candida albicans
MRSYKSSITDENELTKQRLRAKSIANLSSNHATAGQTSTSSQHREALTDLTSQENKNHPRVKLTQTNTNHHRNSSSSSNKIQIYQQIEQKKTDIHQFKKPRLEKVLLNDDDDETDDEFDDEEDKENRYHDLELNDDDSKHQLISEAFETIDDRGISEGENDTAQEARERLEEETQSHTQDMRSIYGVHVPMQPMWNNAIINELKYVIQKYSRNTLDENDEDTYDTTMVAEYSPEIFNYLHELENKFTPDPNYMDFQDDLKWEMRAVLIDWVVQVHARFNLFSETLYLTVNYIDRFLSKRRVSLSRFQLVGAVALFIAAKYEEINCPTVQEIAYMADNAYSIDEFLKAERFMIDVLEFDLGWPGPMSFLRRISKADDYDYETRTLAKYFLEITIMDSKFVASPPSWLAAGAHYISRILLGRGEWTELHVFYSGYTEKQLQPLADVLLENCRHAEINHKAIFEKYKERRYRKSSLFVQEYFRHIMSRVDLKTSFQQCGTLHFIQSSQNH

SEQ ID NO: 2137 - protein, 262 aa, Arabidopsis thaliana
EQTIINLHSLLGNKWSSIAGNLPGRTDNEIKNYWNTHLRKKLLQMGIDPVTHRPRTDHLNVLAALPQLIAAANFNSLLNLNQNVQLDATTLAKAQLLHTMIQVLSTNNNTTNPSFSSSTMQNSNTNLFGQASYLENQNLFGQSQNFSHILEDENLMVKTQIIDNPLDSFSSPIQPGFQDDHNSLPLLVPASPEESKETQRMIKNKDIVDYHHHDASNPSSSNSTFTQDHHHPWCDTIDDGASDSFWKEIIEQTCSEPWPFPE

SEQ ID NO: 2138 - protein, 236 aa, Arabidopsis thaliana
KEIILNLHAVLGNKWSMIASHLPGRTDNEIKNFWNTHLKKKLIQMGFDPMTHQPRTDDIFSSLSQLMSLSNLRGLVDLQQQFPMEDQALLNLQTEMAKLQLFQYLLQPSPAPMSINNINPNILNLLIKENSVTSNIDLGFLSSHLQDFNSNNLPSLKTLDDNHFSQNTSPIWLHEPPSLNQTMLPTHDPCAQSVDGFGSNQASSSHDQEVAVTDSVDWPDHHLFDDSMFPDISYQS

SEQ ID NO: 2139 - protein, 476 aa, Arabidopsis thaliana
MVQNHQTVLAVDMPQTGGSKYLDDDGKNKRTGSVWTASAHIITAVIGSGVLSLAWATAQLGWLAGPVVMLLFSAVTYFTSSLLAACYRSGDPISGKRNYTYMDAVRSNLGGVKVTLCGIVQYLNIFGVAIGYTIASAISMMAIKRSNCFHKSGGKDPCHMNSNPYMIAFGLVQILFSQIPDFDQLWWLSILAAVMSFTYSSAGLALGIAQVVVNGKVKGSLTGISIGAVTETQKIWRTFQALGDIAFAYSYSIILIEIQDTVKSPPSEEKTMKKATLVSVSVTTMFYMLCGCMGYAAFGDLSPGNLLTGFGFYNPYWLLDIANAAIVIHLIGAYQVYCQPLFAFIEKQASIQFPDSEFIAKDIKIPIPGFKPLRLNVFRLIWRTVFVIITTVISMLLPFFNDVVGLLGALGFWPLTVYFPVEMYIAQKKIPRWSTRWVCLQVFSLGCLVVSIAAAAGSIAGVLLDLKSYKPFRSEY

SEQ ID NO: 2140 - protein, 896 aa, Saccharomyces cerevisiae
MTTTAQDNSPKKRQRIINCVTQLPYKIQLGESNDDWKISATTGNSALYSSLEYLQFDSTEYEQHVVGWTGEITRTERNLFTREAKEKPQDLDDDPLYLTKEQINGLTTTLQDHMKSDKEAKTDTTQTAPVTNNVHPVWLLRKNQSRWRNYAEKVIWPTFHYILNPSNEGEQEKNWWYDYVKFNEAYAQKIGEVYRKGDIIWIHDYYLLLLPQLLRMKFNDESIIIGYFHHAPWPSNEYFRCLPRRKQILDGLVGANRICFQNESFSRHFVSSCKRLLDATAKKSKNSSDSDQYQVSVYGGDVLVDSLPIGVNTTQILKDAFTKDIDSKVLSIKQAYQNKKIIIGRDRLDSVRGVVQKLRAFETFLAMYPEWRDQVVLIQVSSPTANRNSPQTIRLEQQVNELVNSINSEYGNLNFSPVQHYYMRIPKDVYLSLLRVADLCLITSVRDGMNTTALEYVTVKSHMSNFLCYGNPLILSEFSGSSNVLKDAIVVNPWDSVAVAKSINMALKLDKEEKSNLESKLWKEVPTIQDWTNKFLSSLKEKASSDDDVERKMTPALNRPVLLENYKQAKRRLFLFDYDGTLTPIVKDPAAAIPSARLYTILQKLCADPHNQIWIISGRDQKFLNKWLGGKLPQLGLSAEHGCFMKDVSCQDWVNLTEKVDMSWQVRVNEVMEEFTTRTPGSFIERKKVALTWHYRRTVPELGEFHAKELKEKLLSFTDDFDLEVMDGKANIEVRPRFVNKGEIVKRLVWHQHGKPQDMLKGISEKLPKDEMPDFVLCLGDDFTDEDMFRQLNTIETCWKEKYPDQKNQWGNYGFYPVTVGSASKKTVAKAHLTDPQQVLETLGLLVGDVSLFQSAGTVDLDSRGHVKNSESSLKSKLASKAYVMKRSASYTGAKV

SEQ ID NO: 2141 - protein, 171 aa, Hamamelis virginiana
LHLFYQYNPDSAVWGNITWGHAVSRDMIHWLYLPIAMIPDHWFDWFGVWTGSATLLPDGRIIILYTGETDHYVQVQNLAYPANQSDPLLLDWVKYEDNPVIVPPTGIKPKDFRDPTTAWLGPDGTWRVTVGSKVNKTGISLVYQTTNFTSYELLDGVLHAVVGTGMWECPD

SEQ ID NO: 2142 - protein, 280 aa, Triticum aestivum
MDQYEKVEKIGEGTYGVVYKAKDRYTNETIALKKIRLEQEDEGVPSTAIREISLLKEMQHRNIVRLQDVVHNEKCIYLVFEYLDLDLKKHMDSSADFKNHHIVKSFLYQILHGIAYCHSHRVLHRDLKPQNLLIDRRTNSLKLADFGLARAFGIPVRTFTHEVVTLWYRAPEILLGARQYSTPVDVWSVGCIFAEMVNQKPLFPGDSEIDELFKIFRIMGTPNEETWPGVSSLPDYKSAFPKWPSVDLATVVPTLEPLGLDLLSKMLCLDPTRRINARTA

SEQ ID NO: 2143 - protein, 617 aa, Cichorium intybus
MKTAEPLSDLEDASNRTPLLDHPAPPPAAVKKQSFVRVLSSITLVSLFFVLAFVLIVLNQQDSTNATANLALPEKSSAQHYQSDRLTWERTAYHFQPAKNFIYDPNGPLFHMGWYHLFYQYNPYAPIWGNMSWGHAVSKDMINWFELPVALTPTEWYDIEGVLSGSTTALPNGQIFALYTGNANDFSQLQCKAVPLNTSDPLLLEWVKYENNPILFTPPGIGLKDYRDPSTVWTGPDGKHRMIMGTKINRTGLVLVYHTTDFTNYVMLEEPLHSVPDTDMWECVDLYPVSTINDSALDIAAYGPDMKHVIKESWEGHGMDWYSIGTYDVINDKWTPDNPELDVGIGLRVDYGRFFASKSLYDPLKKRRVTWGYVAESDSADQDLNRGWATIYNVARTIVLDRKTGTHLLHWPAEEIESLRYDGREFKEIELAPGSIMPLDIGPATQLDIVATFEVEQETFMRTSDTNGEYGCTTSAGATERGSLGPFGIAVLADGTLSELTPVYFYISKKTDGSVATHFCTDKLRSSLDYDGERVVYGSTVPVLDGEELTMRLLVDHSVVEGFAMGGRTVMTSRVYPTKAIYEGAKIFLFNNATHTSVKASLKIWQIASVRIQPYPF

SEQ ID NO: 2144 - protein, 994 aa, Selaginella lepidophylla
MPQPYPSSSSTSNAKEAGGGAAAAGGGGGGAFSLPPSLASSRVERLVRERQLRNQRQEDEPEDEQQALEAEEAAVAATEVPDAVAAATPSLSDEPSKISSGRGQRLLVVANRLPLSATRKGETEWNLEMSAGGLVSALLGVKQFEVTWIGWPGVYVQDEKGEKSLRGALEEKGFVPVLLDEATVDQYYNGYCNNVLWPLFHYIGLRQEDRLAATRSLLSQFNAYKRANRLFAEAVFNFYQEGDVVWCHDYHLMFLPSYLKEKDSQMKVGWFLHTPFPSSEIYRTLPLRAELLQGVLAADLVGFHTYDYARHFVSACTRILGLEGTPEGVEDQGKNTRVAAFPVGIDSERFIEAVETDAVKKHMQELSQRFAGRKVMLGVDRLDMIKGIPQKLLAFEKFLEENSEWRDKVVLVQIAVPTRTDVLEYQKLTSQVHEIVGRINGRFGSLTAVPIHHLDRSMKFPELCALYAITDVLLVTSLRDGMNLVSYEFVACQKDKKGALILSEFAGAAQSLGAGSILINPWNIIESSNAIADALNMPEEEREERHRHNFMHITTHSAQVWAETFISELNDSILEAELRTLHIPPQLPLDKAVAKYSESKNRLVILGFNSTLTAQVEAPRGRAPDQIREMKIRLHPSIKDILNVLCSDPKTTIVILSGSERVALDEVFGEFDLWLAAENGMFLRHTQGEWMTTMPEHLNMDWLESVQLVFDYFCERTPRSFVETRETSLVWNYKYADVEFGRVQARDMLQHLWTGPISNAAVDVVQGGKSVEVRPVGVSKGSAIDRILGEIVHSKHMTIPIDYVLCIGHFLSKDEDIYTFFEPELPLLDRDSSTSNGGKPLGGKLPIDRKSSKSSSRMKPPVSSPKSPGRGSEQQQQAEEASRWEGSSVLDLQGENYFSCAVGTMKRSLARYCLTSSEEVVTFLTSLTSTVAAAAGAGAGARATGSGAAGAGAGAGAGGDHEAPGSPIRKSDSFKTSGWHSPTPRSPKLAPAVQ

SEQ ID NO: 2145 - protein, 282 aa, Perilla frutescens
GSWRSLPKLAGLLRCGKSCRLPWTNYLRPDIKRGPFSTEEEKLVIQLHGILGNRWAAIASQLPGRTDNEIKNLWNTHLKKRLLLMGIDPHTHEPSLTSNGLLTRPPSSPSTRHMAQWESPRLDAEARLSKESLLSIHAPLPKSEADHFLRLSNSEVGETFRKIKNGEKAEPPSPSQSPGSSASTKCCSFSGTTTEIGLQSGLHETDCKSSKTCTEYVRTGTDSSSSNEMEDSSESTLQLLLDFPCKNDMSFLGNADCYSLYPGFTNGSLYDSSSQEKKGGFV

SEQ ID NO: 2146 - protein, 509 aa, Vicia faba
MLQRSRTLPSKIYQGVIEERKDGRHYIELEPLPKMETETKPITIQSKCLDDDGRVKRTGTFWTASAHIITAVIGSGVLSLSWAIAQLGWAVGPVVMVLFAVVNLYTSTLLTQCYRSDDSVAGPRNYTYTDAVKSILGGKKFKICGVIQYVNLFGVAIGYTIAASVSMMAIKRSNCYHESHGNDPCHMSSNVYMIAFGIAEVILSQIPDFDQVWWLSIVAAIMSFTYSAVGLGLGVAKVAENGTFHGRLMGISIGTVTPAGTVTGTQKVWRSLQALGAMAFAYSFSIILIEIQDTIKSPPAEHKTMKKATMLSIMVTTVFYILCGSMGYAAFGDHVPGNLLTGFGFYNPYWLLDIANFAIVVHLVGAYQVFSQPFFAFVEKWSAHKWPKNKFVTEEYDIPIPCIGVYKLNLFRLIWRTIFVLLTTLIAMLLPFFNDVVGLLGAFGFWPLTVYFPIDMYISQKKIGRWTNRWLGLQMLSGCCLIISTLAAVGSIAGVVLDLKTYKPFKTSY

SEQ ID NO: 2147 - protein, 332 aa, Escherichia coli
MKTLGEFIVEKQHEFSHATGELTALLSAIKLGAKIIHRDINKAGLVDILGASGAENVQGEVQQKLDLFANEKLKAALKARDIVAGIASEEEDEIVVFEGCEHAKYVVLMDPLDGSSNIDVNVSVGTIFSIYRRVTPVGTPVTEEDFLQPGNKQVAAGYVVYGSSTMLVYTTGCGVHAFTYDPSLGVFCLCQERMRFPEKGKTYSINEGNYIKFPNGVKKYIKFCQEEDKSTNRPYTSRYIGSLVADFHRNLLKGGIYLYPSTASHPDGKLRLLYECNPMAFLAEQAGGKASDGKERILDIIPETLHQRRSFFVGNDHMVEDVERFIREFPDA

SEQ ID NO: 2148 - protein, 349 aa, Solanum tuberosum
MAGSNINQPLLDQLPKTLQNVDSRRRRLRRLKSAPMPEFVPGEMNDIKDDQSLPRYESILDKLHPSFRKVILYLAIYLTIGTTCFYFVQNQIQGKKVNGVLDSVYFCVVTMTTVGYGDLVPNSATAKLLASFFVFSGMALVGMVLSKGADYLVEKQETLLIKALHMRDKVGPSVILEEIETNKVRYKCFVITATLVVLIVVGTVFLAEVEKLSTIDAFYCVCSTITTLGYGDKSFSTKAGRIFAIFWILTSTLCLAQFFLYVAEFNTERKQKELVQWVLSRKMTNVDLEVADLDNDRVVAAAEFVVYKLKEMGKISQDDVSLLLDEFECLDVDQSGTLSTTDLSLAQSS

SEQ ID NO: 2149 - protein, 452 aa, Helicobacter pylori
MNETLYCSFCKKPESRDPKKRRIIFASNLNKDVCVCEYCIDVMHGELHKYDSKYDRMDSLLALKRDRLRRMESSAYEEEFLLSRIPAPKELKAVLDNYVIGQEQAKKVFSVAVYNHYKRLSFKEKLKKQDNQDSDLELEHLEEVELSKSNILLIGPTGSGKTLMAQTLAKHLDIPIAISDATSLTEAGYVGEDVENILTRLLQASDWNVQKAQKGIVFIDEIDKISRLSEHRSITRDVSGEGVQQALLKIVEGSLVNIPPKGGRKHPEGNFIQIDTSDILFICAGAFDGLAEIIKKRTTQNVLGFTQEKMSKKEQEAILHLVQTHDLVTYGLIPELIGRLPVLSTLDSISLEAMVDILQKPKNALIKQYQQLFKMDEVDLIFEEEAIKEIAKLALERKTGARGLRAIIEDFCLDIMFDLPKLKGSEVRITKDCVLKQAEPLIIAKTHSKILP

SEQ ID NO: 2150 - protein, 302 aa, Saccharomyces cerevisiae
MNRFKQLEKLGNGTYATVYKGLNKTTGVYVALKEVKLDSEEGTPSTAIREISLMKELKHENIVRLYDVIHTENKLTLVFEFMDNDLKKYMDSRTVANTPRGLELNLVKYFQWQLLQGLAFCHENKILHRDLKPQNLLINKRGQLKLGDFGLARAFGIPVNTFSSEVVTLWYRAPDVLMGSRTYSTSIDIWSCGCILAEMITGKPLFPGTNDEEQLKLIFDIMGTPNESLWPSVTKLPKYNPNIQQRPPRDLRQVLQPHTKEPLDGNLMDFLHGLLQLNPDMRLSAKQALHHPWFAEYYHHAS

SEQ ID NO: 2151 - protein, 765 aa, Schizosaccharomyces pombe
MNFEDIEDQDGIRLSWNTFSATPAENARAVIPIAAMYTPLHENERMTIEQYDPVACRAPCRAVLNPYCHVDLRARFWICPFCFQRNPLPAQYSDISSNSLPLELLSQSTTMEYVLSKPVKSPPVFLFVMDTAVDESELTALKDAVIVSLSLLPPDAIVGLITYGSLIQVHEIGFEAMPKSYVFQPAADYSTMKLQQLLALSGNQIRSSSSKAKISGTGITLNLGAASRFLMPVQKCEMHLLNILEQLQPDCLEVPAGQRQLRCTGAAVKIASDLLGIAFPKCGSRIELFCGGPCTVGLGQVVSTELKEPMRSHSEIANDKAKHFKKSKKFYSSLAERLSNQGHALDLFAGCLDQVGIMEMENLVNNTGGAIVLSDSFTTSIFKQSFQRLFSVDASGYLKMGFMANLEVLTSKGLTICGMIGNGVGENKKGTNISDTQIGISKTNSWKMAAISPKSSYALYFDLGKEMGNPNSQRPTQAFIQFLTYYQHSSGTYRLRVTTISRSFITGNAKSISESFDQEAAAAIVARMALFKCQTEDEMSVTRWIDRNLIRLCQHFADYRKEDPSSFRLLPNFTLYPQFIFHLRRSPFLHIFNNSPDETSFYRHMLNVADVNDSLIMIQPTLQSYSFNEPEGVPVLLDSVSIKPDVILLLDTYFHILIFHGSTIAQWRNAGYQEQPEYVNLKELLLAPRLEVTELLADRFPIPRFIVCDQGGSQARFLLSRINPSVSFNKSSQFSPMSKDSETVLTDDVNLQKFMDHLRKMAVIS

SEQ ID NO: 2152 - protein, 480 aa, Saccharomyces cerevisiae
MSSNRVLDLFKPFESFLPEVIAPERKVPYNQKLIWTGVSLLIFLILGQIPLYGIVSSETSDPLYWLRAMLASNRGTLLELGVSPIITSSMIFQFLQGTQLLQIRPESKQDRELFQIAQKVCAIILILGQALVVVMTGNYGAPSDLGLPICLLLIFQLMFASLIVMLLDELLSKGYGLGSGISLFTATNIAEQIFWRAFAPTTVNSGRGKEFEGAVIAFFHLLAVRKDKKRALVEAFYRTNLPNMFQVLMTVAIFLFVLYLQGFRYELPIRSTKVRGQIGIYPIKLFYTSNTPIMLQSALTSNIFLISQILFQKYPTNPLIRLIGVWGIRPGTQGPQMALSGLAYYIQPLMSLSEALLDPIKTIVYITFVLGSCAVFSKTWIEISGTSPRDIAKQFKDQGMVINGKRETSIYRELKKIIPTAAAFGGATIGALSVGSDLLGTLGSGASILMATTTIYGYYEAAAKEGGFTKNLVPGFSDLM

SEQ ID NO: 2153 - protein, 499 aa, Saccharomyces cerevisiae
MSRLERLTSLNVVAGSDLRRTSIIGTIGPKTNNPETLVALRKAGLNIVRMNFSHGSYEYHKSVIDNARKSEELYPGRPLAIALDTKGPEIRTGTTTNDVDYPIPPNHEMIFTTDDKYAKACDDKIMYVDYKNITKVISAGRIIYVDDGVLSFQVLEVVDDKTLKVKALNAGKICSHKGVNLPGTDVDLPALSEKDKEDLRFGVKNGVHMVFASFIRTANDVLTIREVLGEQGKDVKIIVKIENQQGVNNFDEILKVTDGVMVARGDLGIEIPAPEVLAVQKKLIAKSNLAGKPVICATQMLESMTYNPRPTRAEVSDVGNAILDGADCVMLSGETAKGNYPINAVTTMAETAVIAEQAIAYLPNYDDMRNCTPKPTSTTETSLPRVAAVFEQKAKAIIVLSTSGTTPRLVSKYRPNCPIILVTRCPRAARFSHLYRGVFPFVFEKEPVSDWTDDVEARINFGIEKAKEFGILKKGDTYVSIQGFKAGAGHSNTLQVSTV

SEQ ID NO: 2154 - protein, 1412 aa, Arabidopsis thaliana
MSKEVGATPGLVPTHSPEVQGPKSYANVVSSRPSLTKFNVDVSVVDGKSMVVVPDVVLEDSVPLWDDFLVGRFPSSAPHIAKIHVIVNKIWNLGDKSIRIDVFAVNDNTVKFRIRNASARLRALRRGMWNICDLPMIVSKWTPIVEDAQPEIKSMPMWVVIKNVPYSMFTWPGLVAVGNDLVESVPLVDSQALEVVKGDIAEEVEEGEIASNSNQKSVQGEKIQEEGDWLTVSSSGGKKYISKVRKDFNLWSILEEVQNEDSVGKETEDSVKGVLEVVVVEGKEEMALNKTQQVKSCFDGASTRVSIPRSSKKAHKFVSVPNQKATDVLPRQFGCVLETRVIESKVPVIFAKVFKDWQMVSNYEFNRLGRIWVVWSSSVQLQVIFKSSQMIVCLVRVEHYDVEFICSFIYASNFVEERKKLWQDLHNLQNSVAFRNKPWLLFGDFNETLKMEEHSSYAVSPMVTPGMRDFQIVVRYCSLEDMRTHGPLFTWGNKRNEGLICKKLDRVLLNPEYNSAYPHSYCIMDSGGCSDHLRGRFHLRSAIQKPKGPFKFTNVIAAHPEFMPKVEDFWKNTTELFPSTSTLFRFSKKLKELKPILKDLSRNNLSDLTRRATYAYEELCRCQTKSLTTLNPHDIVDESLAFERWEKERHLLNAIHEVMDPQGTRPPNQDDIKIEAVRFFSDLLSSQPSDFTGISVDELKGILQYRYSLHEQNLLVAEITEAEVMKVFFSIPLNKSPGPDGYTVEFFRETWSVIGQEVTMAIKSFFTYGFLPKGLNSTILALIPKRTYAKEMKDYRPISCCNVLYKAISKLLANRLKCLLPEFIAPNQSAFISDRLLMENLLLASELVKDYHKDGLSPRCAMKIDLSKAFDSVQWPFLLNTLAALDIPEKFIHWINLCISTASFSVQVNGLRQGCSLSPYLFVICMNVLSAMLDKGAVEKRFGYHPRCRNMGLTHLCFADDIMVFSAGSAHSLEGVLAIFKDFAAFSGLNISLEKSTLFMASISSETCASILARFPFDSGSLPVRYLGLPLMTKRMTLADCLPLLEKIRSRISSWKNRFLSYAGRLQLLNSVISSLTKFWISAFRLPRACIREIEQISAAFLWSGTDLNPHKAKVAWHDVCKPKSEGGLGLRSLVDANKICCFKLIWRLVSAKHSLWVNWIQNNLIRTVAEALSSHRRRSHRDDILNDIEEELEKLLCRGICTEQDRSLCRSIGGQFKAKFFSPEIWHQIREQGLVKQWHKAIWFSGATPKFTFISWLAAHDRLTTGDKMASWNRGISSVCVLCNISAESRDHLFFSCNFSSHIWDRLTRRLLLCRYTTNFPALLLLLSGQDFSGTKRFLLRYVFQATIHTLWRERNKRRHGDLPIPSDHIIKFIDRQTRNRLSTITKQGLHKYADGLRIWFAARDNLTPNH

SEQ ID NO: 2155 - protein, 176 aa, Secale cereale
MASTALSSAFTLLHAKPATTSLLRPHPFVPVHGRRPSVAVACTSTAAASPKVLELGDAIAGLTLEEARGLVDHLQERLGVSAAAFAPAAAVAAPADRAEAEAPAEQTEFDVVIEEVPSSARIATIKVVRALTSLALKDAKDLIEGLPKKLKEAVGKDEAEDAKKQLEAVGAKVTVA

SEQ ID NO: 2156 - protein, 402 aa, Solanum tuberosum
MMEPNPNPNPNPISSSLLLFLLFFTPTMVAPLGINYGQIANNLPLPENVVPLVKSIGATRIKLYDADPHVLKAFANTGVEFIVSLGNEYLSKMKDPSKAQSWVKNNVQAYLPATKITCIAVGNEVLTFNDTILTDNLLPAMQSVHTALVNLKLDKQVTVTTAHSLAILQTSYPPSAGAFRRDLVNCVTQIVDFHCKTGSPFLINAYPYFAYKGNPKQVSLDFVLFQPNSGIVDPESNLHYDNMLFAQIDAVHSALASIGYKNVCVQISETGWPSKGDADEAGATPENARKYNCNLMKLIGQKKGTPMRPNSDLNIYVFALFNENLKPGPSSERNYGLFKPDGSQAYPLGVPAINAVSTNSSNSGGSGSTLSASVPPASSSSGYLAITSDSVSILASSFSLFL

SEQ ID NO: 2157 - protein, 577 aa, Fragaria x
MIFSLWQFCLLSLLLSFGVIELQASHHVYSNLQTTQLASTHPQAKDPYRTGYHFQPRKNWINDPNGPLIYKGIYHLFYQYNPSSVVWGNIVWAHSTSTDLVNWIPHEAAIYPSILSDINGCWSGSVTILPSGKPAILYTGINPDKEQVQNLAFPKNLSDPFLREWVKVPQNPLMAPTQANQINASSFRDPTTAWLGPDKRWRLIIGSKRNHRGLAILYRSKDFMHWTKAKHPLYSTPKNGMWECPDFFPVSKTKLLGLDTSAIGPDVKHVLKVSLDNTRKEYYTIGTYNVSKDIYIPDDGSIESDSGLRYDYGKFYASKTFFDSAKNRRILWGWINESSSVSGDIKKGWSGLQAIPRTIVLDKSRKQLVQWPVVELEKLRTNEVKLPSTLLKGGSLHEVIGVTAAQADVDVAFEISDLKKAEVMDPSWTNAQLLCSKKGTSVKGALGPFGLLAFVSKDLKEKTAIFYRIFKSHNNNNKYVVLMCSDQSRSSLNPDNDMTTYGTFVNVDPLHEKLSLRSLIDHSIVESFGGKGKECITARVYPTLAVDGDTHLYAFNYGSESVKIAGSAWSMKTAKIN

SEQ ID NO: 2158 - protein, 591 aa, Arabidopsis thaliana
METVEAGHDDVIGWFEHVSENACKVQSETLRRILELNSGVEYLRKWLGTVDVEKMDDYTLETLFTSLVPIVSHADLDPYIQRIADGETSPLLTQEPITVLSLSSGTTEGRQKYVPFTRHSAQTTLQIFRLSAAYRSRFYPIREGGRILEFIYAGKEFKTLGGLTVGTATTHYYASEEFKTKQETTKSFTCSPQEVISGGDFGQCTYCHLLLGLHYSSQVEFVASAFSYTIVQAFSFFEEIWREICADIKEGNLSSRITLPKMRKAVLALIRPNPSLASHIEEICLELETNLGWFGLISKLWPNAKFISSIMTGSMLPYLNKLRHYAGGLPLVSADYGSTESWIGVNVDPHLPPEDVSFAVIPTFSYFEFIPLYRRQNQSDICIDGDFVEDKPVPLSQVKLGQEYELVLTTFTGLYRYRLGDVVEVTSFHKGTPKLSFIYRRKLILTINIDKNTEKDLQRVVDKASQLLSRSTRAEVVDFTSHADVIARPGHYVIYWEIRGEADDKALEECCREMDTAFVDYGYVVSRRMNSIGPLELRVVERGTFGKVAERCVGKCGGLNQFKTPRCTTNSVMLDILNDSTIKRFRSSAYD

SEQ ID NO: 2159 - protein, 1724 aa, Cryptococcus neoformans
MGGRWEGGGMGRETWASESGWSQNEPNYPPSDYHGGPGYLPSRASTPTFEGSNAGHRPRDPYPAWTVDANIPLSKEEIEDVLIDLANKFGFQKDSSRNVYDFLMIQLDSRASRMSPNQALLTLHADYIGGEHANYRKWYFAAQLDLDDAIGAVQNPGLNRVRSVARRGGKTKNPLATAQEKSLESATSRWRTAMNNMSQYDRLRQVALYLLCWGEAAQVRFMPECLCFIFKCADDYYRSPECQNRQEAVPEGLYLRAVIKPLYRFLRDQGYEVVDGKFLRRERDHDKVIGYDDVNQLFWYPEGISRITLNDNTRLVDIPPAQRFMKFDRIDWNKVFFKTYLEKRSFFHLLVNFNRIWVLHISVFWFFTAYNAPSIYAPSGSTTATTPMAWSMTGLGGFVATLIMIAATLAEFSYIPTTWNNTSHLTRRLIFLLIILAITGGPSIYIAFFNQTGHVALILGIVQFFCSVVATIAFATLPSGRMFGDRVAGKSRKYLANQTFTASYPALGFYPRVASFLLWFLVFGCKFTESYFFLTLSFRDPMKVMNGMKVQNCHDKYFGNGLCTNQPAFALAVMFVMDLTLFFLDTFLWYVIWNTVFSIARSFAIGMSIWTPWKDIFARLPKRIYAKILATDDMEVKYKPKVLVSQVWNAVIISMYREHLLSIEHVQKLLYHQIQSDQPGKRTLRAPAFFISQSEKGSKAEFFPKGSEAERRICFFAQSLTTSIPAPIPVDAMPTFTVLVPHYSEKILLSLREIIREEDQNTRVTLLEYLKQLHPVEWDNFVRDTKILAEESDAFNGGNPFASDEKEEAKKADDIPFYTIGFKSAAPEYTLRTRIWASLRAQTLYRTVSGFMNYSKAIKLLYRVENPEVVQLFGGNTDQLERELERMARRKFKFVVSMQRYSKFNKEEHENAEFLLRAYPDLQIAYLDEEPPRKDGGESRIFSALIDGHSEIMPNGRRRPKFRIELPGNPILGDGKSDNQNHAIVFYRGEYLQLIDANQDNYLEECLKIRNVLGEFEEFKVSTQSPYAAQGHADFAKFPVAILGAREYIFSENIGILGDIAAGKEQTFGTLAARSLSYIGGKLHYGHPDFLNAIYMNTRGGVSKAQKGLHLNEDIFAGMLAFGRGGRIKHSEYYQCGKGRDLGFGTILNFQTKIGTGMGEQMLSREYYYLGTQLPIDRFLTFYYGHPGFHINNILVMMSVQVFMLALVFLGTLNKQLTVCRYSSGGDILPGQSGCYNLVPVFKWIKRCIISIFIVFWMAFVPLFVQELTERGTGRAILRLCKHFLSLSPVFEVFSTQIYMHSILNDLTFGGARYIATGRGFATTRISFSILYSRFAGPSIYLGMRTLVLLLFITLTVWVPHLIYFWITVVGLCVAPFLFNPHQFAIADFIIDYREFLRWMSRGNSRTHANSWVGYCRLSRTRVTGFKRKRLGLPSEKLSSDVPRAPWKAILIGEIIGPICLAILFVICYLFIKSFAVDGQIQPGLVRIAIIALGPIVWNMALLITLFLISVFLGPCLNSYTHQFGATMAALAHFGAVAGMLVFFELLWFLELWNTSHAVLGIIAVISVQRCIFKFLIAVFLSREFKHDETNRAWWTGVWFNRGLGSHALSQPAREFVVKTIEMGLYSADFIACHLLLALLTIPMFIPYFDRVHATMLFWLAPNQQIRPPIYSFRQRSQRRKIVFKYGLLYLIIQGIFIALIVVPIIFKDVAGLTPKSVPFNGII

SEQ ID NO: 2160 - protein, 351 aa, Triticum sp.
MSDVTAVMDLEVEEPQLALPPGFRFHPTDEEVVTHYLTRKVLRESFSCQVITDVDLNKNEPWELPGLAKMGEKEWFFFAHKGRKYPTGTRTNRATKKGYWKATGKDKEIFRGKGRDAVLVGMKKTLVFYTGRAPSGGKTPWVMHEYRLEGELPHRLPRTAKDDWAVCRVFNKDLAARNAPQMAPAADGGMEDPLAFLDDLLIDTDLFDDADLPMLMDSPSGADDFAGASSSTCSAALPLEPDAELPVLHPQQQQSPNYFFMPATANGNLGGAEYSPYQAMGDQQAAIRRYCKPKAEVASSSALLSPSLGLDTAALAGAETSFLMPSSRSYLDLEELFRGEPLMDYSNMWKI

SEQ ID NO: 2161 - protein, 417 aa, Brassica napus
MAATAATTSSSHLLLSSSRHVAASSQPQILFQRSLFSGGKRSAAGKNHHASGGVRCMAVAADASAEAKPAAARKKSGYELQTLTGWLLRQEQKGEIDTELTIVMSSIAMACKQIASLVQRAGISNLTGVQGAVNIQGEDQKKLDVVSNEVFSNCLRSSGRTGIIASEEEDVPVAVEESYSGNYIVVFDPLDGSSNIDAAVSTGSIFGIYSPNDECIVDDSDDISSLGSEEQRCIVNVCQPGNNLLAAGYCMYSSSVIFVLTLGKGVFSFTLDPMYGEFVLTQENIEIPKAGKIYSFNEGNYQMWDEKLKKYIDDLKDPGPSGKPYSARYIGSLVGDFHRTLLYGGIYGYPRDAKSKNGKLRLLYECAPMSFIVEQAGGKGSDGHQRVLDIQPTEIHQRVPLYIGSKEEVEKLEKYLA

SEQ ID NO: 2162 - protein, 174 aa, Secale cereale
MASTTFSSAFSILSLPSSSPSPPPSPPRTLPVANRRRRAAAVASTATESPKVLELGDAIAGLTLEEARNLVDHLQERLCVSAASFPPAAAGLRAAAVEEAPVEQTEFDVVIEEVPSSARIATIKIVRALTNLALKEAKDLIEGLPKKLKEAVSKDEAEEAKKQLEGVGAKVSIA

SEQ ID NO: 2163 - protein, 542 aa, Yarrowia lipolytica
MIYTANSSPSTNLQWLSTLNTDDIPTKNYRKSSIIGTIGPNTNSAEMISKLRQAGLNIVRMNFSHGSYEYHQSVIENARESEQRFRGRPLAIALDTKGPEIRTGVTKDDKDWDVKAGHVMLFSTNPKYKDQCDDKIMYIDYTNIVKQIDIGKIIFVDDGVLSFKVLEKIDGETLKVETLNNGKISSRKGVNLPGTDVDLPALSEKDKADLKFGVEHGVDMIFASFVRTANDVQAIRDVLGEKGKGIQVISKIENQQGVNNFDEILKETDGVMVARGDLGIEIPAPQVFIAQKQLIAKCNLAGKPVICATQMLDSMTYNPRPTRAEVSDVGNAVLDGADCVMLSGETAKGTYPIESVKMMHETCLVAEKAIAYAPLFNEMRTLTVRPTETVETIAISAVSASFEQQARAIIVLSTSGTSARLCSKYRPNCPILMVTRNAQAARFSHLYRGVYPFIYHKARASNPAEWQHDVEERLKWGMDEAVALGILNKGDVVVAIQGWTGGLATPTLSEFSSVSKLFNTNLLDYKTYSMVIKSVNGGVLYK

SEQ ID NO: 2164 - protein, 376 aa, Nepenthes alata
AVIGSGVLSLAWATAQLGWIAGPTAMLLFSFITFYTSRLLADCCRSGDSFTGERNPTYMDAVRSNLGGIQVKICGLVQYANLFGVSIGYTIAASISMMAIKRSNCFHASDDKNPCQYPASPFMIIFGLTEIIFAQIPDFHRLWWLSIVAAVMSFTYSTVGVSLGIAQVAENGKIKRSLTGISIGTVSQAQRIWRRFQALGDIAFAYSYSLVLVEIQDTIKSPPSEIKTMKKATVMSIAVTTLIYLLCGCMGYAAFGDLAPGNLLTGFGFYNPYWLLDLANAAIVVHLLGAYQVCCQPIFAFIETTASNAFPDNEFITKEVEIPIPGFKPYKLNLFRLVWRTSFVGVTTTISILLPFSNGVVGLLGALAFWPLTVYY

SEQ ID NO: 2165 - protein, 352 aa, Samanea saman
MASNGAREPLLPQSPDPAPPKTNGQVSRRRYLRCRSAPLANVDPPEKTDIGSIHRFDSILGKLHPSFRTVALYLIGYLGIGAVIFYLVRHQITGKKTEGVLDAIYFTIVTMTTVGYGDLVPNSDLTKLLACAFVFTGMALVGLILSKAADYLVEKQEALIIKALHGNHEVGPTKILQEAEVNRKWYKFFVVFVLLVALIIMGTIFLVAVEKLDVIDAFYCVCCTITTLGYGDKSFSSEGGRVFAVFWILTGTICLAQLFLCIAEMNTEKRRKEITEMVLKRRITIADLEAADIDHDGTVGVAEFIIYKLKEMGKISQEDIALIMQQFEELDVDQSGTLSPSDLTLAQAPWPS

SEQ ID NO: 2166 - protein, 702 aa, Arabidopsis thaliana
MSGSVSGCGSGGCSIVWFRRDLRVEDNPALAAAVRAGPVIALFVWAPEEEGHYHPGRVSRWWLKNSLAQLDSSLRSLGTCLITKRSTDSVASLLDVVKSTGASQIFFNHLYDPLSLVRDHRAKDVLTAQGIAVRSFNADLLYEPWEVTDELGRPFSMFAAFWERCLSMPYDPESPLLPPKKIISGDVSKCVADPLVFEDDSEKGSNALLARAWSPGWSNGDKALTTFINGPLLEYSKNRRKADSATTSFLSPHLHFGEVAWANEGNEAGEESVNLFLKSIGLREYSRYISFNHPYSHERPLLGHLKFFPWAVDENYFKAWRQGRTGYPLVDAGMRELWATGWLHDRIRVVVSSFFVKVLQLPWRWGMKYFWDTLLDADLESDALGWQYITGTLPDSREFDRIDNPQFEGYKFDPNGEYVRRWLPELSRLPTDWIHHPWNAPESVLQAAGIELGSNYPLPIVGLDEAKARLHEALSQMWQLEAASRAAIENGSEEGLGDSAEVEEAPIEFPRDITMEETEPTRLNPNRRYEDQMVPSITSSLIRPEEDEESSLNLRNSVGDSRAEVPRNMVNTNQAQQRRAEPASNQVTAMIPEFNIRIVAESTEDSTAESSSSGRRERSGGIVPEWSPGYSEQFPSEENGIGGGSTTSSYLQNHHEILNWRRLSQTGYVKSAFGGAKGEEHHKGCNSGEIWLDCKPSTFGTV

SEQ ID NO: 2167 - protein, 626 aa, Chlamydia trachomatis
MSEKRKSNKIIGIDLGTTNSCVSVMEGGQPKVIASSEGTRTTPSIVAFKGGETLVGIPAKRQAVTNPEKTLASTKRFIGRKFSEVESEIKTVPYKVAPNSKGDAVFDVEQKLYTPEEIGAQILMKMKETAEAYLGETVTEAVITVPAYFNDSQRASTKDAGRIAGLDVKRIIPEPTAAALAYGIDKEGDKKIAVFDLGGGTFDISILEIGDGVFEVLSTNGDTHLGGDDFDGVIINWMLDEFKKQEGIDLSKDNMALQRLKDAAEKAKIELSGVSSTEINQPFITIDANGPKHLALTLTRAQFEHLASSLIERTKQPCAQALKDAKLSASDIDDVLLVGGMSRMPAVQAVVKEIFGKEPNKGVNPDEVVAIGAAIQGGVLGGEVKDVLLLDVIPLSLGIETLGGVMTPLVERNTTIPTQKKQIFSTAADNQPAVTIVVLQGERPMAKDNKEIGRFDLTDIPPAPRGHPQIEVTFDIDANGILHVSAKDAASGREQKIRIEASSGLKEDEIQQMIRDAELHKEEDKQRKEASDVKNEADGMIFRAEKAVKDYHDKIPAELVKEIEEHIEKVRQAIKEDASTTAIKAASDELSTRMQKIGEAMQAQSASAAASSAANAQGGPNINSED

SEQ ID NO: 2168 - protein, 532 aa, Agaricus bisporus
MYPVDGIRSQIEWNTTLNVSDAPVPTETTKYHRKTAIIATIGPKINTVEKLTDVRLAGVNIVRMNFSHGTHEYHQSVIDNTRQMIKNDPHGRPVAIALDTKGPEIRTGQTRDGNDYPIKAGDEFIVTTDPKYSDICDNKVLFVDYANLASVTAPGKLIYIDDGIISLLILSIDGMNLHVRALNNGTLSSRKGVNLPKTDVDLPPLSEKDKDDLRFGIRNGVDMIFASFIRRGEDVRQIREVLGPDGASIKIIVKIENEQGVANFDEILKEADGVMVARGDLGIEIPASQVFLAQKMMIAKCNIVGKPVIVATQMLESMTYNPRPTRAEVSDVANAVLDGSDCVMLSGETAKGSYPVQSVLMMAETCLLAETAICYPPLYDDLRAVQARPTETAETVAIAAVAAAAEQDAKALLVLSTSGETARLVSKYRPKIPIITVTRNEQTARQIHLHRGCYPFWYPEPRGVQNHQWQTDVDNRIRFGLRNALALNVIQPGASIIAVQGWKGGLGHTNTLRILTVPTDPADLELQPLGSL

SEQ ID NO: 2169 - protein, 568 aa, Zymomonas mobilis
MSYTVGTYLAERLVQIGLKHHFAVAGDYNLVLLDNLLLNKNMEQVYCCNELNCGFSAEGYARAKGAAAAVVTYSVGALSAFDAIGGAYAENLPVILISGAPNNNDHAAGHVLHHALGKTDYHYQLEMAKNITAAAEAIYTPEEAPAKIDHVIKTALREKKPVYLEIACNIASMPCAAPGPASALFNDEASDEASLNAAVEETLKFIANRDKVAVLVGSKLRAAGAEEAAVKFADALGGAVATMAAAKSFFPEENPHYIGTSWGEVSYPGVEKTMKEADAVIALAPVFNDYSTTGWTDIPDPKKLVLAEPRSVVVNGIRFPSVHLKDYLTRLAQKVSKKTGALDFFKSLNAGELKKAAPADPSAPLVNAEIARQVEALLTPNTTVIAETGDSWFNAQRMKLPNGARVEYEMQWGHIGWSVPAAFGYAVGAPERRNILMVGDGSFQLTAQEVAQMVRLKLPVIIFLINNYGYTIEVMIHDGPYNNIKNWDYAGLMEVFNGNGGYDSGAGKGLKAKTGGELAEAIKVALANTDGPTLIECFIGREDCTEELVKWGKRVAAANSRKPVNKLL

SEQ ID NO: 2170 - protein, 438 aa, Thermococcus kodakaraensis
MYRTHYSSEITEELNGQKVKVAGWVWEVKDLGGIKFLWIRDRDGIVQITAPKKKVDPELFKLIPKLRSEDVVAVEGVVNFTPKAKLGFEILPEKIVVLNRAETPLPLDPTGKVKAELDTRLNNRFMDLRRPEVMAIFKIRSSVFKAVRDFFHENGFIEIHTPKIIATATEGGTELFPMKYFEEDAFLAESPQLYKEIMMASGLDRVYEIAPIFRAEEHNTTRHLNEAWSIDSEMAFIEDEEEVMSFLERLVAHAINYVREHNAKELDILNFELEEPKLPFPRVSYDKALEILGDLGKEIPWGEDIDTEGERLLGKYMMENENAPLYFLYQYPSEAKPFYIMKYDNKPEICRAFDLEYRGVEISSGGQREHRHDILVEQIKEKGLNPESFEFYLKAFRYGMPPHGGFGLGAERLIKQMLDLPNIREVILFPRDRRRLTP

SEQ ID NO: 2171 - protein, 568 aa, Zymomonas mobilis
MSYTVGTYLAERLVQIGLKHHFAVAGDYNLVLLDNLLLNKNMEQVYCCNELNCGFSAEGYARAKGAAAAVVTYSVGALSAFDAIGGAYAENLPVILISGAPNNNDHAAGHVLHHALGKTDYHYQLEMAKNITAAAEAIYTPEEAPAKIDHVIKTALREKKPVYLEIACNIASMPCAAPGPASALFNDEASDEASLNAAVDETLKFIANRDKVAVLVGSKLRAAGAEEAAVKFTDALGGAVATMAAAKSFFPEENALYIGTSWGEVSYPGVEKTMKEADAVIALAPVFNDYSTTGWTDIPDPKKLVLAEPRSVVVNGIRFPSVHLKDYLTRLAQKVSKKTGSLDFFKSLNAGELKKAAPADPSAPLVNAEIARQVEALLTPNTTVIAETGDSWFNAQRMKLPNGARVEYEMQWGHIGWSVPAAFGYAVGAPERRNILMVGDGSFQLTAQEVAQMVRLKLPVIIFLINNYGYTIEVMIHDGPYNNIKNWDYAGLMEVFNGNGGYDSGAAKGLKAKTGGELAEAIKVALANTDGPTLIECFIGREDCTEELVKWGKRVAAANSRKPVNKVV

SEQ ID NO: 2172 - protein, 610 aa, Staphylococcus aureus
MSKIIGIDLGTTNSCVTVLEGDEPKVIQNPEGSRTTPSVVAFKNGETQVGEVAKRQAITNPNTVQSIKRHMGTDYKVDIEGKSYTPQEISAMILQNLKNTAESYLGEKVDKAVITVPAYFNDAERQATKDAGKIAGLEVERIINEPTAAALAYGLDKTDKDEKVLVFDLGGGTFDVSILELGDGVFEVLSTAGDNKLGGDDFDQVIIDYLVAEFKKENGVDLSQDKMALQRLKDAAEKAKKDLSGVSQTQISLPFISAGENGPLHLEVNLTRSKFEELSDSLIRRTMEPTRQAMKDAGLTNSDIDEVILVGGSTRIPAVQEAVKKEIGKEPNKGVNPDEVVAMGAAIQGGVITGDVKDVVLLDVTPLSLGIEILGGRMNTLIERNTTIPTSKSQIYSTAVDNQPSVDVHVLQGERPMAADNKTLGRFQLTDIPPAERGKPQIEVTFDIDKNGIVNVTAKDLGTNKEQRITIQSSSSLSDEEIDRMVKDAEVNAEADKKRREEVDLRNEADSLVFQVEKTLTDLGENIGEEDKKSAEEKKDALKTALEGQDIEDIKSKKEELEKVIQELSAKVYEQAAQQQQQAQGANAGQNNDSTVEDAEFNEVKDDDKK

SEQ ID NO: 2173 - protein, 125 aa, Arabidopsis thaliana
MASNTSFLFVTVTLLLVLNVSSRALPPVADSTNIAARLTGGGLMQCWDALYELKSCTNEIVLFFLNGETKLGYGCCNAVDVITTDCWPAMLTSLGFTLEETNVLRGFCQSPNSGGSSPALSPVKL

SEQ ID NO: 2174 - protein, 491 aa, Glycine max
SNMLLNYVPVYVMLPLGVVNVDNVFEDPDGLKEQLLQLRAAGVDGVMVDVWWGIIELKGPKQYDWRAYRSLFQLVQECGLTLQAIMSFHQCGGNVGDIVNIPIPQWVLDIGESNHDIFYTNRSGTRNKEYLTVGVDNEPIFHGRTAIEIYSDYMKSFRENMSDFLESGLIIDIEVGLGPAGELRYPSYPQSQGWEFPRIGEFQCYDKYLKADFKAAVARAGHPEWELPDDAGKYNDVPESTGFFKSNGTYVTEKGKFFLTWYSNKLLNHGDQILDEANKAFLGCKVKLAIKVSGIHWWYKVENHAAELTAGYYNLNDRDGYRPIARMLSRHHAILNFTCLEMRDSEQPSDAKSGPQELVQQVLSGGWREDIRVAGENALPRYDATAYNQIILNAKPQGVNNNGPPKLSMFGVTYLRLSDDLLQKSNFNIFKKFVLKMHADQDYCANPQKYNHAITPLKPSAPKIPIEVLLEATKPTLPFPWLPETDMKVDG

SEQ ID NO: 2175 - protein, 475 aa, Pichia angusta
MVKGNVIVVSNRIPVTIKKTEDDENGKSRYDYTMSSGGLVTALQGLKNPFRWFGWPGMSVDSEQGRQTVERDLKEKFNCYPIWLSDEIADLHYNGFSNSILWPLFHYHPGEMNFDEIAWAAYLEANKLFCQTILKEIKDGDVIWVHDYHLMLLPSLLRDQLNSKGLPNVKIGFFLHTPFPSSEIYRILPVRKEILEGVLSCDLIGFHTYDYVRHFLSSVERILKLRTSPQGVVYNDRQVTVSAYPIGIDVDKFLNGLKTDEVKSRIKQLETRFGKDCKLIIGVDRLDYIKGVPQKLHAFEIFLERHPEWIGKVVLIQVAVPSRGDVEEYQSLRAAVNELVGRINGRFGTVEFVPIHFLHKSVNFQELISVYAASDVCVVSSTRDGMNLVSYEYIACQQDRKGSLVLSEFAGAAQSLNGALVVNPWNTEELSEAIYEGLIMSEEKRRGNFQKMFKYIEKYTASYWGENFVKELTRV

SEQ ID NO: 2176 - protein, 876 aa, Arabidopsis thaliana
MNPFSSGTRLRDMIRAIRACKTAAEERAVVRKECADIRALINEDDPHDRHRNLAKLMFIHMLGYPTHFGQMECLKLIASPGFPEKRIGYLGLMLLLDERQEVLMLVTNSLKQDLNHSNQYVVGLALCALGNICSAEMARDLAPEVERLIQFRDPNIRKKAALCSTRIIRKVPDLAENFVNAAASLLKEKHHGVLITGVQLCYELCTINDEALEYFRTKCTEGLIKTLRDITNSAYQPEYDVAGITDPFLHIRLLRLLRVLGQGDADASDLMTDILAQVATKTESNKNAGNAVLYECVETIMAIEDTNSLRVLAINILGRFLSNRDNNIRYVALNMLMKAITFDDQAVQRHRVTILECVKDPDASIRKRALELVTLLVNENNVTQLTKELIDYLEISDEDFKEDLSAKICFIVEKFSPEKLWYIDQMLKVLCEAGKFVKDDVWHALIVVISNASELHGYTVRALYKSVLTYSEQETLVRVAVWCIGEYGDLLVNNVGMLGIEDPITVTESDAVDVIEDAITRHNSDSTTKAMALVALLKLSSRFPSISERIKDIIVKQKGSLLLEMQQRAIEYNSIVDRHKNIRSSLVDRMPVLDEATFNVRRAGSFPASVSTMAKPSVSLQNGVEKLPVAPLVDLLDLDSDDIMVAPSPSGADFLQDLLGVDLGSSSAQYGATQAPKAGTDLLLDILSIGTPSPAQNSTSSIRLLSIADVNNNPSIALDTLSSPAPPHVATTSSTGMFDLLDGLSPSPSKEATNGPAYAPIVAYESSSLKIEFTFSKTPGNLQTTNVQATFTNLSPNTFTDFIFQAAVPKFLQLHLDPASSNTLLASGSGAITQNLRVTNSQQGKKSLVMRMRIGYKLNGKDVLEEGQVSNFPRGL

SEQ ID NO: 2177 - protein, 357 aa, Pisum sativum
MAVKEATSETKKRSGYEIITLTSWLLQQEQKPIIDAELTIVLSSISMACKQIASLVQRANISNLTGTQGAVNIQGEDQKKLDVISNEVFSNCLRSSGRTGIIASEEEDVPVAVEESYSGNYIVVFDPLDGSSNLDAAVSTGSIFGIYSPNDECLPDFGDDSDDNTLGTEEQRCIVNVCQPGSNLLAAGYCMYSSSVIFVLTIGKGVFVFTLDPLYGEFVLTQENLQIPKSGKIYSFNEGNYKLWDENLKKYIDDLKEPGPSGKPYSARYIGSLVGDFHRTLLYGGIYGYPRDKKSKNGKLRLLYECAPMSFIVEQAGGKGSDGHQRVLDIQPTEIHQRVPLYIGSTEEVEKVEKYLA

SEQ ID NO: 2178 - protein, 236 aa, Arabidopsis thaliana
MDQIVSGEEEDLDVDIEDGRFNETQEITTNLVSAEGDSENVLNHVWSGRLSFDGSEKSADDLVDPLMGEGKRRERSSQSLDLSDMKFDNDKFKKTRKPSKPPRPPKGPLLSANDQKLMREITELAMRKRARIERMKTLRRLKAAKSSSPCSSIFAMIVTVIFFVFLIFQGFFTSNASLNSDNSPAPNNSANNRMVSVQFYNEFAPRERIDPSPTTSFRYKRVSGADNEENTREVTR

SEQ ID NO: 2179 - protein, 408 aa, Solanum tuberosum
MAASAATATATTSYLSALDKKTPFLFALDKKTPFLCPKSSTKRRSFNGGVKCMAIETTSGFTATKKRSGYELQTLTSWLLRQEQAGVIDAELTIVISSISMACKQIASLVQRAGISNLTGVQGAVNIQGEDQKKLDVVSNEVFSNCLRSSGRTGIIASEEEDVPVAVEESYSGNYIVVFDPLDGSSNIDAAVSTGSIFGIYNPNDECLADHGDDSTLDNIEQKCIVNVCQPGTNLLAAGYCMYSSSVIFVLTLGNGVFSFNLDPMYGEFVLTQENVQIPKSGKIYSFNEGNYQLWDDKLKKYIDDLKDPGPSGKPYSARYIGSLVGDFHRTLLYGGIYGYPRDQKSKNGKLRLLYECAPMSFIVEQAGGKGSDGHQRVLDIQPTEVHQRVPLYIGSTEEVEKLEKYLS

SEQ ID NO: 2180 - protein, 961 aa, Nicotiana tabacum
MVELNNCSNSEENGCVDSLEVRFTDFCKNGLSMGESFVTEATKLFNDSKHLLLSNNSTIGVITEGVERYWFVFVLYSVKRLSEKEVGNSSNGNEGNAFSLCQILRGAKLNVVDFFKELPQFILKVGPTLSNLYGSDWEKRLEAKELQTNFVHLSLLSKYYKRAYQELFLASGNNEDKPSATSSSAIHLPQYYRFGWLLFLSLRIHVFSRFKDLVTCTNGLVSVLAILIIHVPVRFRNFNINDSSRFVKKGDKVDLLASLGKIYQTSIDDLRETMDKVNYLITEKLKKKPCLASEFRTENLDNLDTDGLTYFEDLMEESCLPSSVSILEKDYSDAIQNKGELDERIFVNEEDSLLGSGSLSGGVVNMNGVKRKFDAMASPAKTVTSTLSPYRSPNCANSKMTVATPVSTAMTTARWLRTVIAPLQPKPSAELERFLSSCDRDVTADVIRRAQIILEAIFPSSGPAEHCAAGGSLQSTSLMDNIWAEQRTSEALKLYYRVLQTMCTAESQILNGNNLTSLLTNERFHRCMLACSAELVLATHKTVTMLFPAVLERTGITAFDLSKVIESFIRHEESLPRELRRHLNSLEERLLESMVWEKGSSMYNSLAVAKPSLAAEINRTGLLAEPMPSLDAIAMHINLSSGSLPPLPSLHKNNLAPNGQIGDIRSPKKVCSEYRSVLVERNSFTSPVKDRFLALNNIKSKFPPPALQSAFASPTRPNPGGGGETCAETAINVFFGKIVKLAAVRINGMIERLQLSQQIRETVYCLFQKILSQRTSLFFNRHIDQIILCSFYGVAKRTGADHVDIITFYNEMFIPSVKPLLVELAPAGNAEKNNHNDGQGPASPKPSPFPKLPDMSPKKVSAVHNVYVSPLRASKMDALISHSSKSYYACVGESTHAYQSPSKDLDVINNRLNGNRKLRGALNFDVDAGLVSDSIVANSLYLQNGNCRSPVAHVKTEQPES

SEQ ID NO: 2181 - protein, 473 aa, Antirrhinum majus
MGSRNIVQQQNRAEAAVPGAMKQKNIAGEKKNRRALGDIGNLVTVRGVDGKAKAIPQVSRPVTRSFCAQLLANAQTAAADNNKINAKGAIVVDGVLPDRRVAAARVPAQKKAAVVKPRPEEIIVISPDSVAEKKEKPIEKEKAAEKSAKKKAPTLTSTLTARSKAASGVKTKTKEQIVDIDAADVNNDLAVVEYVEDMYKFYKSVENESRPHDYMGSQPEINEKMRAILIDWLVQVHHKFELSPETLYLTINIVDRYLASETTIRRELQLVGIGAMLIASKYEEIWAPEVHELVCISDNTYSDKQILVMEKKILGALEWYLTVPTPYVFLVRFIKASMTDSDVENMVYFLAELGMMNYATLIYCPSMIAAASVYAARCTLNKAPFWNETLQLHTGFSEPQLMDCAKLLVAFPKMAGDQKLKSIYRKYSNLERGAVALLSPAKSVFVFLIELLMNAIEKIQCSLFFTSEIWCRF

SEQ ID NO: 2182 - protein, 441 aa, Antirrhinum majus
MGSRHQVVQQQNRGDVVPGAIKQKSMAVEKKNRRALGDIGNVVTVRGVEGKALPQVSRPITRGFCAQLIANAEAAAAENNKNSLAVNAKGADGALPIKRAVARVPVQKKTVKSKPQEIIEISPDTEKKKAPVLEKEITGEKSLKKKAPTLTSTLTARSKAASVVRTKPKEQIVDIDAADVNNDLAVVEYVEDMYKFYKSAENDSRPHDYMDSQPEINEKMRAILIDWLVQVHYKFELSPETLYLTINIVDRYLASKTTSRRELQLLGMSSMLIASKYEEIWAPEVNDLVCISDGSYSNEQVLRMEKKILGALEWYLTVPTPYVFLVRFIKASLPDSDVEKNMVYFLAELGMMNYATIIMYCPSMIAAAAVYAARCTLNKMPIWNETLRMHTGFSEVQLMDCAKLLIDFHGGSTDQKLQGIYRKYSRLEKGAVALLPQPLLA

SEQ ID NO: 2183 - protein, 637 aa, Brucella melitensis
MAKVIGIDLGTTNSCVAVMDGKNAKVIENAEGARTTPSIIAFTDGDEGVAGQPAKRQAVTNPEGTLFAVKRLLGRRYDDPMVTKDKDLVPYKIVKGDNGDAWVEVHGKKYSPSQISAMILQKMKETAESYLGETVTQAVITVPAYFNDAQRQATKDAGKIAGLEVLRIINEPTAAALAYGLDKSEGKTIAVYDLGGGTFDVSVLEIGDGVFEVKSTNGDTFLGGEDFDIRLVEYLVAEFKKESGIDLKNDKLALQRLKDAAEKAKTELSSSQQTEINLPFITADQTGPKHLAIKLSRANVESLVDDAVHATVEPCKAALKDAGLKAGEIDEVVLVGGMTRMPEIQKCVKAFFGKEPHKGVNPDEVVAMGAAIQGGVLQGDVKDVLLLDVTPLSLGIETLGGVFTRLIERNTTIPTKKSQTFSTAEDNQSAVTIRVFQASVKLAADNKLLGQFDLVGIPPAPRGVRQIEVTFDIDANGIVNVSAKDGGVPKEHQIRIQASGGLSDADIEKMVKDAEANAEADKKRRESVEAKNQAESLVHSTEKSLAEYGDKVSADDKKAIEDAIAALKTSLEGEDAEDIKAKTQALAEVSMKLGQAMYEAAQAAEGAGAEGGEQASSSKDDVVDADYEEIDDNKKSS

SEQ ID NO: 2184 - protein, 355 aa, Kluyveromyces lactis
MAGIKHRRDSAESINTDIITLSRFILDQQHLSAKNATGEFSMLLNSLQFAFKFISQTIRRAELVNLIGLAGASNSTGDQQKKLDVLGDEIFINAMKASGNVKVLVSEEQEDLIVFRNSPGKYAVCCDPIDGSSNLDAGVSVGTIVSLFKIHENQNGNSGEEDSEGTINDVARCGREMVAACYTMYGASTHLVLTTGAGVNGFTLDNNLGEFILTYPELRLPEQKSIYSINEGNTCYWEPTIADFIAKLKENSEENNGKPYSARYIGSMVADVHRTLLYGGLFSYPGDKKNPNGKLRLLYEAFPMAFLVEQAGGKAVNDRGERILDLVPQHIHDKSSIWLGSSGDVDKYLKHIGKL

SEQ ID NO: 2185 - protein, 495 aa, Saccharomyces cerevisiae
MTTDNAKAQLTSSSGGNIIVVSNRLPVTITKNSSTGQYEYAMSSGGLVTALEGLKKTYTFKWFGWPGLEIPDDEMDQVRKDLLEKFNAVPIFLSDEIADLLYNWFSNSILWPLFHYHPGEINFDENAWLAYNEANQTFTNEIAKTMNHNDLIWVHDYHLMLVPEMLRVKIHEKQLQNVKVGWFLHTPFPSSEIYRILPVRQEILKGVLSCDLVGFHSYDYARHFLSSVQRVLNVNTLPNGVEYQGRFVNVGAFPIGIDVDKFTDGLKKESVQKRIQQLKETFKGCKILVGVDRLDYIKGVPQKLHAMEVFLNEHPEWRGKVVLVQVAVPSRGDVEEYQYLRSVVNELVGRINGQFGTVEFVPIHFMHKSIPFEELISLYAVSDVCLVSSTRDGMNLVSYEYIACQEEKKGSLILSEFTGAAQSLNGAIIVNPWNTDDLSDAINEALTLPDVKKEVNWEKLYKYISKYTSAFWGENFVHELYSTSSSSTSSSATKN

SEQ ID NO: 2186 - protein, 535 aa, Hordeum vulgare
MEVNVKGNYVQVYVMLPLDAVSVNNRFEKGDELRAQLRKLVEAGVDGVMVDVWWGLVEGKGPKAYDWSAYKQLFELVQKAGLKLQAIMSFHQCGGNVGDAVNIPIPQWVRDVGTRDPDIFYTDGHGTRNIEYLTLGVDNQPLFHGRSAVQMYADYMTSFRENMKDFLDAGVIVDIEVGLGPAGEMRYPSYPQSHGWSFPGIGEFICYDKYLQADFKAAAAAVGHPEWEFPNDAGQYNDTPERTQFFRDNGTYLSEKGRFFLAWYSNNLIKHGDRILDEANKVFLGYKVQLAIKISGIHWWYKVPSHAAELTAGYYNLHDRDGYRTIARMLKRHRASINFTCAEMRDSEQSSQAMSAPEELVQQVLSAGWREGLNVACENALPRYDPTAYNTILRNARPHGINQSGPPEHKLFGFTYLRLSNQLVEGQNYVNFKTFVDRMHANLPRDPYVDPMAPLPRSGPEISIEMILQAAQPKLQPFPFQEHTDLPVGPTGGMGGQAEGPTCGMGGQVKGPTGGMGGQAEDPTSGMGGELPATM

SEQ ID NO: 2187 - protein, 1229 aa, Arabidopsis thaliana
MVSLESEIQFRLIECTRFISQVLALVEYKNGSDRVNEILDNSEKRGGPPRDQGSFIDFRSFISKNGLWDLKYSGNPFSWRGMRYDWFVRQRLDRAMSNNSWLESFPSGRSEYLRFEGSDHRPLVVFVDEARVKRRGQFRFDNRLRDNDVVNALIQETWTNAGDASVLTKMNQCRREIINWTRLQNLNSAELIEKTQKALEEALTADPPNPTTIGALTATLEHAYKLEEQFWKQRSRVLWLHSGDRNTGYFHAVTRNRRTQNRLTVMEDINGVAQHEEHQISQIISGYFQQIFTSESDGDFSVVDEAIEPMVSQGDNDFLTRIPNDEEVKDAVFSINASKAPGPDGFTAGFYHSYWHIISTDVGREIRLFFTSKNFPRRMNETHIRLIPKDLGPRKVADYRPIALCNIFYKIVAKIMTKRMQLILPKLISENQSAFVPGRVISDNVLITHEVLHFLRTSSAKKHCSMAVKTDMSKAYDRVEWDFLKKVLQRFGFHSIWIDWVLECVTSVSYSFLINGTPQGKVVPTRGLRQGDPLSPCLFILCTEVLSGLCTRAQRLRQLPGVRVSINGPRVNHLLFADDTMFFSKSDPESCNKLSEILSRYGKASGQSINFHKSSVTFSSKTPRSVKGQVKRILKIRKEGGTGKYLGLPEHFGRRKRDIFGAIIDKIRQKSHSWASRFLSQAGKQVMLKAVLASMPLYSMSCFKLPSALCRKIQSLLTRFWWDTKPDVRKTSWVAWSKLTNPKNAGGLGFRDIERCNDSLLAKLGWRLLNSPESLLSRILLGKYCHSSSFMECKLPSQPSHGWRSIIAGREILKEGLGWLITNGEKVSIWNDPWLSISKPLVPIGPALREHQDLRVSALINQNTLQWDWNKIAVILPNYENLIKQLPAPSSRGVDKLAWLPVKSGQYTSRSGYGIASVASIPIPQTQFNWQSNLWKLQTLPKIKHLMWKAAMEALPVGIQLVRRHISPSAACHRCGAPESTTHLFFHCEFAAQVWELAPLQETTVPPGSSMLDALSLLKKAIILPPTGVTSAALFPWICGIYGKLGTMTRAILDALAWQSAQRCLPKTRNVVHPISQLPVLRSGYFCFVDAAWIAQSSLAGSGWVFQSATALEKETATYSAGCRRLPSALSAEAWAIKSALLHALQLGRTDLMVLSDSKSVVDALTSNISINEIYGLLMEIRALRVSFHSLCFNFISRSANAIADATAKLSFCNVDGRGTLSSGYVRLV

SEQ ID NO: 2188 - protein, 503 aa, Secale cereale
MAGNMLANYVQVYVMLPLDVVSVDNKFEKGDEIRAQLKKLTEAGVDGVMIDVWWGLVEGKGPKAYDWSAYKQVFDLVHEAGLKLQAIMSFHQCGGNVGDVVNIPIPQWVRDVGATGPTFFYTNRSGTRNIEYLTLGVDDQPLFHGRTAVQMYADYMASFRENMKKFLDAGTIVDIEVGLGPAGEMRYPSYPQSQGWVFPGIGEFICYDKYLEADFKGAAAKAGHPEWELPDDAGEYNDTPEKTQFFKENGTYLTEKGKFFLSWYSNKLIKHGDKILDEANKVFLGCRVQLAIKVSGIHWWYRVPNHAAELTAGYYNLDDRDGYRTIARMLTRHHASMNFTCAEMRHSEQSEEAKNAPEELVQQVLSAGWREGLHVACENALGRYDATAYNTILRNARPKGINENGPPQHKLYGFTYLRLSNELQEGQNYATFQTFVEKMHANLGHDPTVDPVAPLERSKPEMPIEMILKAARPKLEPFPFDKNTDLPVKDHTDVGDEVFLAPV

SEQ ID NO: 2189 - protein, 306 aa, Sporothrix schenckii
MDGKRQLNSFQQLEKLGEGTYATVFKGRNRHTGEFVALKEIHLDSEEGTPSTAIREISLMKELKHENIVALHDVIHTESKLMLVFEYMDGDLKKYMDTNGERGALKPMLIKSFMYQLLKGIDFCHQNRVLHRDLKPQNLLINGKGQLKLGDFGLARAFGIPVNTFSNEVVTLWYRAPDVLLGSRTYNTSIDIWSVGCIMAEMYTGRPLFPGTTNEDQMLRIFRIMGTPAEHNWPGISQFPEYKATAPRYATQDLRQILPQIDATGIDLLQRLLQLRPELRISAHDALQHPWFHDILQYQHCQQAAG

SEQ ID NO: 2190 - protein, 280 aa, Phaseolus vulgaris
GEGTYGVVYKARDRVTNEAIALKKIRLEQEDEGVPSTAIREISLLKEMQHRNIVRLQDVVHSGKRLYLVFEYLDLDLKKHMDSSPEFAKDLRQVKMFLYQILCGIAYCHSHRVLHRDLKPQNLLIDRSTNSLKLADFGLARAFGIPVRTFTHEVVTLWYRAPEILLGSPRYSTPVDIWSVGCIFAEMVNQRPLFPGDSEIDELFKIFRILGTPNEDTWPGVTSLPDFKSAFPKWQPKDLKTVVPNLDPAGLDLLSRMLHLDPSKRITGRSALEHEYSERH

SEQ ID NO: 2191 - protein, 427 aa, Myxococcus xanthus
MAGKNVEKRDNQTLCCSFCGKSQKEVKKLIAGPTVYICDECIGLCNDIIAEEIDREETKDTKLRIPRPSEIKAVLDEYVIGQERAKKTLSVAVHNHYKRIESKVAMEDVELQKSNILLLGPTGSGKTLLAQTLARILNVPFTIADATCLTEAGYVGEDVENIIVNLLQAADHDIERAQRGIVYIDEIDKIARKSENPSITRDVSGEGVQQALLKLIEGTVANVPPKGGRKHPQQEFLQVDTTNILFICGGAFGGLDQVIERRMGGRSLGFGADVQSKKQRSLTELLKHVEPEDLLKFGMIPEFIGRLPIITALEELDEAALINILNQPKNALTKQYRKLFELDGVTLKFTDGALKAIANEAIRRKAGARGLRSILESAMLDVMYEIPSRKTAREVLISEEVILKKSEPVVLHAQPEKEAAEPKKESA

SEQ ID NO: 2192 - protein, 538 aa, Hypocrea jecorina
MSQISRTQSIMATTAQEHLETGGRINWLASLNTAFTPARNFRRTSIICTIGPKTNSVEALNKLRDAGLNVARMNFSHGSYEYHQSVIDNVRASVAAHPGRPVAIALDTKGPEIRTGNTAGDVDIPISAGTVMNFTTDEKYATACDTQNMYVDYKNITKVIQPGRVIYVDDGVLAFDVLSIKDDQTVEVRARNNGFISSRKGVNLPNTDVDLPALSEKDKADLRFGVKNNVDMVFASFIRRAQDIKDIRDVLGPEGKQIQIIAKIENRQGLNNFAEILEETDGVMVARGDLGIEIPAAEVFAAQKKMIAMCNIAGKPVICATQMLESMIKNPRPTRAEISDVGNAVTDGADCVMLSGETAKGNYPAESIHEMHEASLKAENTIPYVSHFEEMCTLVKRPVSTVESCAMAAVRASLDLGAGGIIVLSTSGDSARLLSKYRPVCPIFMVTRNPTTSRFSHLYRGVYPFLYPEQKPDFDTVNWQEDVDKRIKWAVTRAIELKTLTAGDTVVVVQGWKGGMGNTNTLRIVRADPDHLGIGQME

SEQ ID NO: 2193 - protein, 1098 aa, Saccharomyces cerevisiae
MALIVASLFLPYQPQFELDTSLPENSQVDSSLVNIQAMANDQQQQRALSNNISQESLVAPAPEQGVPPAISRSATRSPSAFNRASSTTNTATLDDLVSSDIFMENLTANATTSHTPTSKTMLKPRKNGSVERFFSPSSNIPTDRIASPIQHEHDSGSRIASPIQQQQQDPTTNLLKNVNKSLLVHSLLNNTSQTSLEGPNNHIVTPKSRAGNRPTSAATSLVNRTKQGSASSGSSGSSAPPSIKRITPHLTASAAKQRPLLAKQPSNLKYSELADISSSETSSQHNESDPDDLTTAPDEEYVSDLEMDDAKQDYKVPKFGGYSNKSKLKKYALLRSSQELFSRLPWSIVPSIKGNGAMKNAINTAVLENIIPHRHVKWVGTVGIPTDEIPENILANISDSLKDKYDSYPVLTDDDTFKAAYKNYCKQILWPTLHYQIPDNPNSKAFEDHSWKFYRNLNQRFADAIVKIYKKGDTIWIHDYHLMLVPQMVRDVLPFAKIGFTLHVSFPSSEVFRCLAQREKILEGLTGADFVGFQTREYARHFLQTSNRLLMADVVHDEELKYNGRVVSVRFTPVGIDAFDLQSQLKDGSVMQWRQLIRERWQGKKLIVCRDQFDRIRGIHKKLLAYEKFLVENPEYVEKSTLIQICIGSSKDVELERQIMIVVDRINSLSTNISISQPVVFLHQDLDFSQYLALSSEADLFVVSSLREGMNLTCHEFIVCSEDKNAPLLLSEFTGSASLLNDGAIIINPWDTKNFSQAILKGLEMPFDKRRPQWKKLMKDIINNDSTNWIKTSLQDIHISWQFNQEGSKIFKLNTKTLMEDYQSSKKRMFVFNIAEPPSSRMISILNDMTSKGNIVYIMNSFPKPILENLYSRVQNIGLIAENGAYVSLNGVWYNIVDQVDWRNDVAKILEDKVERLPGSYYKINESMIKFHTENAEDQDRVASVIGDAITHINTVFDHRGIHAYVYKNVVSVQQVGLSLSAAQFLFRFYNSASDPLDTSSGQITNIQTPSQQNPSDQEQQPPASPTVSMNHIDFACVSGSSSPVLEPLFKLVNDEASEGQVKAGHAIVYGDATSTYAKEHVNGLNELFTIISRIIED

SEQ ID NO: 2194 - protein, 454 aa, Lupinus luteus
MASRPIVPLQPQQAKGEGVIGGRRKQENKNGAANGKNRVVLGDIGNLDRVKGANINLNRPITRSLCAQLLAKAEAGENDKNLAIPNVTGPKPQVADGVVAKRRVAPKPAEKKVTAKPKPVEIVEISSGKEVQKDKSANKNKEQGDALSKKKSQTLTSVLTARSKAACGLTEKPKDQIIDIDAGDSRNELAAVEYIEDMYKFYKLAENENRPHQYMDSQPEINERMRAILVDWLIDVQTKFDLSLETLYLTINIVDRFLAVKTVLRRELQLVGVSAMLMASKYEEIWPPEVNDFVCLTDRAYTHEQILVMEKIILGKLEWTLTVPTTFVFLTRFIKASVPDQELENMGHFLSELGMMHYATLVYCPSMVAASAVFAARCTLNKTPIWNETLQLHTGYSEEQLMDCARLLVSFHSTLANGKLKVLYRKYSDPQRGAVSMHPPAKNLMPESSCGSRV

SEQ ID NO: 2195 - protein, 459 aa, Lupinus luteus
MASRPVVPIHQQQVRGEGVIGGGKQKKNVAADGKNRRALGDIGNLDRVKGVEVKPNRPITRSFCAQLLANAQVAAAVENNKKLAIPNVGGAKPNVVEGAVAKRVAPKPAEKKVVEKPKPREAVEISPHEEVQKNKSVVKKKEGGENKKKPQTLSSVLTARSKAACGLTKKPQEQIIDIDANDSGNELAALEYIEDIYKFYKLEESESRPHQYLDSQPEINERMRAILVDWLIDVNNKFDLSLETLYLTINIVDRFLAVKVVPRRELQLLGISAMLLASKYEEIWPPEVNDFVCLSDRAYTHEQILVMEKIILGKLEWTLTVPTPYVFLVRFIKASVPDQELENMSHFLSELGMMHYSTLMYCPSMVAASAVFAARCTLNKTPFWNETLKLHTSYSEEQLMDCAKLLVSFHSTIGGGKLKVVHRKYSDPQKGAVAVLPPAKYLMPESSSSGTRVSKGLDK

SEQ ID NO: 2196 - protein, 228 aa, Hyacinthus orientalis
MGRGKIEIKRIENTTSRQVTFCKRRNGLLKKAYELSVLCDAEVALIVFSTRGRLYEYSNSNSVKTTIERYKKACTDTTNTGTVSEANSQYYQQEATKLRQQITNLQNTNRTLMGESLSTMSLRELKQLEGRLERGINKIRTKKNELLSAEIEYMQKREAEMHNDNMYLRNKIAENERAQQQMNMLPSTATEYEGIPQFDSRNFLQVSLMEPNNHHYSRQQQQTALQLG

SEQ ID NO: 2197 - protein, 1161 aa, Arabidopsis thaliana
MRESIKDPDPNFPLPLGWAVMSTKAKKKELKKWHNRIRPPVTELQGFVDGRAGLNSRNRQRVVRSWIASNNLLVGCFLETHVAQENANSVLASTLPGWRMDSNYCCSELGRIWIVWDPSISVLVFKRTDQIMFCSIKIPSLLQSFAVAFVYGRNSELDRRSLWEDILVLSRTSPLSVTPWLLLGDFNQIAAASEHYSINQSLLNLRGMEDLQCCLRDSQLSDLPSRGVFFTWSNHQQDNPILRKLDRALANGEWFAVFPSALAVFDPPGDSDHAPCIILIDNQPPPSKKSFKYFSFLSSHPSYLAALSTAWEENTLVGSHMFSLRQHLKVAKLCCRTLNRLRFSNIQQRTAQSLTRLEDIQVELLTSPSDTLFRREHVARKQWIFFAAALESFFRQKSRIRWLHEGDANTRFFHRAVIAHQATNLIKFLRGDDGFRVENVDQIKGMLIAYYSHLLGIPSENVTPFSVEKIKGLLPFRCDSFLASQLTTIPSEEEITQVLFSMPRNKAPGPDGFPVEFFIEAWAIVKSSVVAAIREFFISGNLPRGFNATAITLIPKVTGADRLTQFRPVACCTTIYKVITRIISRRLKLFIDQAVQANQVGFIKGRLLCENVLLASELVDNFEADGETTRGCLQVDISKAYDNVNWEFLINILKALDLPLVFIHWIWVCISSASYSIAFNGELIGFFQGKKGIRQGDPMSSHLFVLVMDVLSKSLDLGALNGLFNLHPNCLAPIITHLSFADDVLVFSDGAASSIAGILTILDDFRQGSGLGINREKTELLLDGGNFARNRSLADNLGITHGSLPVRYLGVPLMSQKMRRQDYQPLVDRINSRFTSWTARHLSFAGRLQLLNWIWRKLCKLRPFARPFIICEVGSGVTASFWHDNWTDHGPLLHLTGPAGPLLAGLPLNSVVRDALRDDTWRISSSRSRNPVITLLQRVLPSAASLIDCPHDDTYLWKIGHHAPSNRFSTADTWSYLQPSSTSVLWHKAVWFKDHVPKQAFICWVVAHNRLHTRDRLRRWGFSIPPTCVLCNDLDESREHLFFRCQFSSEIWSFFMRALNLNPPPQFMHCLLWTLTASRDRNITLITKLLFHASVYFIWRERNLRIHSNSVRPAHLIIKEIQLIVRARLDPLSRSSRVVSQPGSSLLASWFGVFQRSPVSG

SEQ ID NO: 2198 - protein, 338 aa, Heliobacterium chlorum
GIDLGTTNFCVSVLEGDEPKVIQNPEGARTTPSVVAFKNGETQVGEVAKRQAITNPNTVQSIKRHMGTDYKVDIDGKSYTPQELSAMILQNLKNTAESYLGDKVDKAVITVPAYFNDAEPYQATKDAGKIAGLEVERIINEPTAAALAYGLDKTEQDQKVLVFDLGGGTFDVSILELGDGVFEVLSTAGDNKLGGDDFDQVIIDYLVSEFKKENGVDLSQDKMALQRLKDAAEKAKKDLSGVSQTQISLPFISAGQNGPLHLEINLTRSKFEELADSLIRRTMEPPRQALKDAGLSTSEIDEVILVGGSTRIPAVQEAVKKEIGKEPHKGVNPDEAVA

SEQ ID NO: 2199 - protein, 360 aa, Chlorobium tepidum
GIDFGTTNSCVRVMQGTQPTVIENSEGSRTTPSMVAFTKTGERLVGQAAKRQAVTNPKNTIFSIKRFMGRKYDEVPNEKKLASYDVVNEGGYAKVKIGDKTYSPQEISAMILQKMKQTAEDFLGEKVTEAVITVPAYFNDAQRQATKDAGKIAGLEVKRIINEPTAAALAYGLDKKKENEKVAVFDLGGGTFDISILELGGGVFEVKSTDGDTHLGGDDFDQVIINYLGDEFKKQEGIDLRKDRIALQRLKEAAEKAKIELSSRTDTEINLPFITATQEGPKHLVINLTRAKFEAMSAALFDKLFEPCRRAIKNSKFDIKEIDEVVLVGGSTRIPKVQSLVKEFFGKEPNKSVNPDEAVA

SEQ ID NO: 2200 - protein, 412 aa, Escherichia coli
SKRRVVVTGLGMLSPVGNTVESTWKALLAGQSGISLIDHFDTSAYATKFAGLVKDFNCEDIISRKEQRKMDAFIQYGIVAGVQAMQDSGLEITEENATRIGAAIGSGIGGLGLIEENHTSLMNGGPRKISPFFVPSTIVNMVAGHLTIMYGLRGPSISIATACTSGVHNIGHAARIIAYGDADVMVAGGAEKASTPLGVGGFGAARALSTRNDNPQAASRPWDKERDGFVLGDGAGMLVLEEYEHAKKRGAKIYAELVGFGMSSDAYHMTSPPENGAGAALAMANALRDAGIEASQIGYVNAHGTSTPAGDKAEAQAVKTIFGEAASRVLVSSTKSMTGHLLGAAGAVESIYSILALRDQAVPPTINLDNPDEGCDLDFVPHEARQVSGMEYTLCNSFGFGGTNGSLIFKKI

SEQ ID NO: 2201 - protein, 494 aa, Pyrenomonas salina
MGTSGVRFLTLVKPFMFALPEVSSATKKIPVNEKLLWTSIVVFLYLVCCQIPLYGITNTKSSDPFYWMRVILASNKGTLMELGISPIVTSGLVMQLLAGSKIIDVDQGTKEDKTLFQGAQKLLGILITIGESVAYVLSGMYGDVKDLGAGNAILIIVQLFTSGIIVICLDELLQKGYGIGSAISLFIATNVCESIVWKSFSPTTINTGRGTEFEGALVALFQLMITKTDKVRALQEAFYRQNLPNVTNLLATVLVFVLVVYFQGFQVELPITPAKSKGMAGQFYPIKLFYTSNMPIILQTALVSNLYFISQILYKRYPENIIIHILGRWEEPEMSVSGQMRPVGGIAYYISPLNSFAEIVSDPVHALLYIIFILASCALFSKTWIQVSGTSASDVSKQLRDQQMVMKGFRASSMQRELNRYIPTAAAFGGMCIGALSIVADFMGAIGSGTGILLAVTTIYQSWETILLAVTTIYQSWETIRKESRDTDALKMFG

SEQ ID NO: 2202 - protein, 406 aa, Thermotoga maritima
MAGKFCSFCGRDIQQVERLIAGPNNVYICNECIDLFHDLLRSDRKVRIKNEIKEIPTPAEIKAELDKYIIGQERAKKVLSVAVYNHYKRVFSNLDSNDVEIEKSNVLLIGPTGTGKTYLARILAKILNVPFAIADATPLTEAGYVGEDVENVVLRLLEAANFDVERAQYGIIYIDEIDKIAKKSPNPSITRDVSGEGVQQALLKILEGTIANVPPQGGRKHPYQEFIKVDTRNILFIAGGAFDGLEEIIKRRIQSTTMGFGAEIKSKKEMRLGEILKHVTPDDLVQYGLIPEFVGRFPVIATLDDLSEDDLVRILKEPKNAVVRQYQKLFEIDGVKLEVTDEALRIIARKALKRGTGARALKNVFEEMMIDMMFELPNLKNVEKVVITEEVALGKEKPIVVMRESA

SEQ ID NO: 2203 - protein, 448 aa, Thermotoga maritima
MIMEELAKKIEEEILNHVREPQIPDREVNLLDFGARGDGRTDCSESFKRAIEELSKQGGGRLIVPEGVFLTGPIHLKSNIELHVKGTIKFIPDPERYLPVVLTRFEGIELYNYSPLVYALDCENVAITGSGVLDGSADNEHWWPWKGKKDFGWKEGLPNQQEDVKKLKEMAERGTPVEERVFGKGHYLRPSFVQFYRCRNVLVEGVKIINSPMWCVHPVLSENVIIRNIEISSTGPNNDGIDPESCKYMLIEKCRFDTGDDSVVIKSGRDADGRRIGVPSEYILVRDNLVISQASHGGLVIGSEMSGGVRNVVARNNVYMNVERALRLKTNSRRGGYMENIFFIDNVAVNVSEEVIRINLRYDNEEGEYLPVVRSVFVKNLKATGGKYAVRIEGLENDYVKDILISDTIIEGAKISVLLEFGQLGMENVIMNGSRFEKLYIEGKALLK

SEQ ID NO: 2204 - protein, 125 aa, Candidatus Liberibacter
MSNIESIVEKLSSLTLLQAAELSKRLEEEWGVSAAAPVAVVASAAGESAAAVAEKTEFEVFLEGFDAKKKISVIKEVRAITELGLKEAKDFVESAPKSLKTGVSKDEAEELKKKLEAAGATIILR

SEQ ID NO: 2205 - protein, 306 aa, Sporothrix schenckii
MDGKRQLNSFQQLEKLGEGTYATVFKGRNRHTGEFVALKEIHLDSEEGTPSTAIREISLMKELKHENIVALHDVIHTESKLMLVFEYMDGDLKKYMDTNGERGALKPMLIKSFMYQLLKGIDFCHQNRVLHRDLKPQNLLINGKGQLKLGDFGLARAFGIPVNTFSNEVVTLWYRAPDVLLGSRTYNTSIDIWSVGCIMAEMYTGRPLFPGTTNEDQMLRIFRIMGTPTEHNWPGISQFPEYKATAPRYATQDLRQILPQIDATGIDLLQRLLQLRPELRISAHDALQHPWFHDILQYQHCQQAAG

SEQ ID NO: 2206 - protein, 895 aa, Oryza sativa
MIRAIRACKTAAEERAVVRRECAAIRAAISEGDQDYRHRNMAKLMFIHMLGYPTHFGQMECLKLIAAAGFPEKRIGYLGLMLLLDERQENAMFCFEHLVVLNADRDLNHSNQFIVGLALCALGNICSAEMARDLSPEVERLLQSREPNTKKKAALCSIRIVRKVPDLAENFMGSAVSLLKEKHHGVLISAVQLCAELCKASKEALEYLRKNCLDGLVRILRDVSNSSYAPEYDIAGITDPFLHIRVLKLMRILGQGDADCSEFVNDILAQLCSVSYIELFALHFQVATKTESNKNAGNAILYECVETIMGIEATSGLRVLAINILGRFLSNRDNNIRYVALNMLMKAMEVDTQAVQRHRATILECVKDADVSIRKRALELVYLLVNDANAKSLTKELVDYLEVSDQDFKDDLTAKICSIVEKFSQDKLWYLDQMFKVLSLAGNYVKDDVWHALIVLISNASELQGYSVRSLYKALLACGEQESLVRVAVWCIGEYGEMLVNNVGMLDIEEPITVTESDAVDAVEVSLKRYSADVTTRAMCLVSLLKLSSRFPPTSESSLLERMPVIDEASYLAKRAASTQATISSDKLAAAATPGSSLKLPNGVAKPPPAPLADLLDLSSDDAPATTSAPTTAPNDFLQDLLGIGLTDTSTAGFDLTFLFIQYIFGLTSEASDAHILTFDTHLCGAPSASTDILMDLLSIGSSPVQNGPPTVSNFSLPGQDENTAYPPITAFQSAALKITFNFKKQSGKPQETTIHASFTNLTSNTFTDFIFQAAVPKFIQLRLDPASSNTLPASGNDSVTQSLSVTNNQHGQKPLAMRIRITYKVNDKLIMNRRRCSTKYDLVKHSSLLAIEAINPPLYRSERALVHEYLACVYRFRPFRNAPVQAIRRDVAEI

SEQ ID NO: 2207 - protein, 493 aa, Arabidopsis thaliana
MGETAAANNHRHHHHHGHQVFDVASHDFVPPQPAFKCFDDDGRLKRTGTVWTASAHIITAVIGSGVLSLAWAIAQLGWIAGPAVMLLFSLVTLYSSTLLSDCYRTGDAVSGKRNYTYMDAVRSILGGFKFKICGLIQYLNLFGIAIGYTIAASISMMAIKRSNCFHKSGGKDPCHMSSNPYMIVFGVAEILLSQVPDFDQIWWISIVAAVMSFTYSAIGLALGIVQVAANGVFKGSLTGISIGTVTQTQKIWRTFQALGDIAFAYSYSVVLIEIQDTVRSPPAESKTMKKATKISIAVTTIFYMLCGSMGYAAFGDAAPGNLLTGFGFYNPFWLLDIANAAIVVHLVGAYQVFAQPIFAFIEKSVAERYPDNDFLSKEFEIRIPGFKSPYKVNVFRMVYRSGFVVTTTVISMLMPFFNDVVGILGALGFWPLTVYFPVEMYIKQRKVEKWSTRWVCLQMLSVACLVISVVAGVGSIAGVMLDLKVYKPFKSTY

SEQ ID NO: 2208 - protein, 421 aa, Aeropyrum pernix
MRVCGWAYRIRDLGRLKFILVRDRSGVIQATVKRGESPEDALRAAEDLKLESVVCVEGELRQAPTREGVEVKVERLEVLSTPVEPLPLEVEGSEKASLPTRLKYRWLDIRNPMVSAIFELEAMVAKVFRDYYWSQGFVEIFTPKIVAAGTESGAEVFPVVYFDKTAFLAQSPQFYKQFAVIAGLERVFEIGPVFRAEPHHTSRHLNEYHSLDIEVGFIESYNDVMNYVEGFMRAIVRMLEEDGRRVLELYGVELPRIPASGIPKIPLRKAYEILEEKYGKKVEYGEDLDSEGERLMGAYAGEELDSDFVFIVEYPWKVRPFYTMRKDDEPSWTYSFDLLYRGLEIVTGGQREHRYHRLLENLRDKGLDAESFQFYLDFFKHGAPPHGGAGMGLERIVMQTLKLENIREARMLPRDTERITP

SEQ ID NO: 2209 - protein, 484 aa, Medicago sativa
MRKSVTLKAGEVPSRLTRARAVALSTSGQLPPMKEVAPGTQNQKQPLRANSKRAVSDVTYLPHEMRAILQDVTNNCGENTNRSCLNPTEIQAKKRKVAKPAQPDVSNEVPSAAERPPFIADSKPVSSMEMRLRSSEDFRCLDDLEDNAPFRMSSNQSGTNNNLLQNQTSRISARLLSSQKKASQIVAAKKGNISELLDVSKHPDVADIDADFEDPQLCSHYAADIYDHLRVAELSRRPYPNFMETVQQDITPSMRAILVDWLVEVSEGYKLQANTLFLTVYLIDWFLSKNCIERERLQLLGITCMLIATKYEEINAPRIEDFCFITDNTYVKEEVVKLESLVLKSSSYQLFAPTTKTFLRRFLRAAQASYKRPSIELEYLANYLAELTLMNYGFLNFLPSMVAASSVFLARWTLDQSSHPWNPTLEQYASYKASDLKATVLALQDLQLNSNDDCPLTAIRKKYTQDKLNCVAALSSPKLLETLF

SEQ ID NO: 2210 - protein, 234 aa, Hevea brasiliensis
MGEAPDVGMDAVQKRLMFDDECILVDENDGVVGHASKYNCHLWENILKGNALHRAFSVFLFNSKYELLLQQRSGTKVTFPLVWTNTCCSHPLYRESELIDEDALGVRNAAQRKLFDELGIPAEDVPVDQFTPLGRILYKASSDGKWGEHELDYLLFIVRDVNVNPNPDEVADVKYVNRDQLKELLRKADSGEEGINLSPWFRLVVDNFLLKWWENVENGTLKEAVDMKTIHKLS

SEQ ID NO: 2211 - protein, 479 aa, Schizosaccharomyces pombe
MSDAHDTIKSLTGDASNSRRLIVVSNRLPITIKRKDNGTYDFSMSSGGLVSALSGLKKLMTFQWLGWCGQEIPEDEKPMIIQRLQDECSAIPVFLDDETADRHYNGFSNSILWPLFHYHPGEINFDEENWEAYRAANYAFAEAIVKNLQDGDLIWVQDYHLMVLPQMLRELIGDKFKDIKIGFFLHTPFPSSEIYRVLPVRNEILEGVLNCDLVGFHTYDYARHFLSACSRILNLSTLPNGVEYNGQMVSVGTFPIGIDPEKFSDALKSDVVKDRIRSIERRLQGVKVIVGVDRLDYIKGVPQKFHAFEVFLEQYPEWVGKVVLVQVAVPSRQDVEEYQNLRAVVNELVGRINGRFGTVEYTPIHFLHKSVRFEELVALYNVSDVCLITSTRDGMNLVSYEYICTQQERHGALILSEFAGAAQSLNGSIVINPWNTEELANSIHDALTMPEKQREANENKLFRYVNKYTSQFWGPKLCR

SEQ ID NO: 2212 - protein, 312 aa, Pseudomonas sp.
MQATHERPTPAPSLRRPGRTRPLRPCRRGGESQPAGPEPQHPGPGERPGLPPAGPGAAPGEPDRPRPAGAGTRPAPAGRRPRAAQCGLPAGQPGQRRTAPGCRPLPRRPPGAPGAGALRRGTPRGAGAIGHRHLVQPAPAPAGRCPGAVRGRCAGTARRPAAGGHAAAQLARGDFLPTGAPAAGPAPAPADGGRPGSLPAGRHPGARRGGAGPGAVGGKRPAAGHRMRQLHGAEGAGGGKRRAEHGATGRGGRRDRGRAPGPAGAGARPAVATLGLRPGQPRRAHPVTGCRGDARADPRRGRPHPTGLGPLS

SEQ ID NO: 2213 - protein, 490 aa, Lycopersicon esculentum
MMTTQNRRSSAVAKRQAMAANSSGLEHNQTGKLNAKKRPALSNISNNTTVSARNSVSHSSKLAPCTSKIVNIKKNTSACNSNAVSSGTAVLPASSSVRPSSKPVSIQRSDAVVPKITVIPVPATCSMDISPSHSDGSLVSMDESMSNSDTVRSPEVEYIDDHELAAVDSIEKKACSTLYISEHVKAAAADICKRDVLVDLESGDKIMNIDNNLVDPQLCATMACDIYKHLRASEAKKRPSTDFMAKVQKDINPSMRAILIDWLVEVAEEYRLVPDTLHLTINYIDRYLSGNLMDRQRLQLLGVACMMIASKYEEICAPQVEEFCYITDNTYFKEEVLQMESAVLNYLKFEMTAPTAKCFLRRFVRAAQGLNEVLSLQLEHLASYIAELSLLEYNMLCYAPSLIAASAIFLAKYILLPSVKPWNSTLRHYTLYQPSDLRDCVLALHSLCCNNNNSSLPAVREKYSQHKYKFVAKKYCPPTVPVEFFQNISS

SEQ ID NO: 2214 - protein, 650 aa, Arabidopsis thaliana
MASTEALLPVTSLQDPLSESRSDQIPETRRRRPIKVHLAVYSGLLLIALYVTLIVTHDGSKAEIATESRPRMAGVSEKSNDGVWISSDDGKVEAFPWNNTILSWQRTAFHFQPEKNWMNGTNIKCPLFYKGWYHFFYQYNPNAAVWGDIVWGHAVSKDLIHWLYLPIAMVPDQWYDANGVWTGSATFLDDGSIVMLYTGSTDEFVQVQNLAYPEDPSDPLLLKWVKFSGNPVLVPPPGIGAKDFRDPTTAWKTSSGKWRITIGSKINRTGISLIYDTTDFKTYEKHETLLHQVPNTGMWECVDFYPVSKTQLNGLDTSVNGPDVKHVIKASMDDTRIDHYAIGTYDDSNATWVPDNPSIDVGISTGLRYDYGKYYASKTFYDQNKGRRILWGWIGESDSEAADVQKGWSSVQGIPRTVVLDTRTHKNLVQWPVEEIKSLRLSSKKFDMTIGPGTVVPVDVGSATQLDIEAEFEIKTDDLKLFFDDDSVEADNKFSCETNGGSTARGALGPFGFSVLADEGLSEQTPVYFYVTKGKHSKLNTVFCTDTSRSTLANDVVKPIYGSFVPVLKGEKLTMRILVDHSIVEGFAQGGRSCITSRVYPTKAIYGATKLFLFNNAIDATVTASFTVWQMNNAFIHPYSSDDLGVPSST

SEQ ID NO: 2215 - protein, 438 aa, Pyrococcus abyssi
MLRTHYSSEITEELNGKKVKVAGWVQEVKDLGGIKFIWIRDREGIVQVTAPKKKVPQEIFKLIPKLNSEDVIVVEGIVNFTPKAKLGFEIIPEKLEVISKAKTPLPLDPTGKVKAELDTRLDNRFMDLRNPRVMSIFKIRSSVFRATREFFYKEGFIEIHTPKIIATATEGGTELFPLKYFENDAFLAQSPQLYKQMMMSTGLDKVFEIGPIFRAEEHNTTRHLNEAWSIDAEMAFIESEEEVMDLLERLILYVINYVRENNEKELKILEFELNEPKKPFPRITYDEALEILSDLGKEIPWGEDIDTEGEKLLGKYMLENEGAELYFIYRYPSEAKPFYIMKYEDKPEVCKAFDLEYRGVEISSGGQREHRHDILVEQIREKGLNPESFEFYLRAFEYGMPPHGGFGLGAERLIMRMLDIGNIREVILFPRDRRRLVP

SEQ ID NO: 2216 - protein, 339 aa, Pyrococcus abyssi
MLHEIPKEEILNELRKLRAKRVLIQSPEGLRKEAEELAEFLEDNGIDAILHGEINYGACDPADYEAKLLNCDVLIHLGHSYMKLHLEVPTIFVPAFAKVNVVDALKENIDEIRKLGRKIILVTTAQHIHQLKEAREFLERMGFLVIIGRGDSRIAWPGQVLGCNYSSAKEDGDGILFIGSGTFHPLGLAISTKKRVLAINPYSGDFKWIDWERFIRKRWAQIAKAYDARSFGVIVSTKKGQLRLAEAKRILKLLREHGRRARLIVMNDVNYYKLEGFPFDAYVVVACPRIALDDYEAWRKPVLTPKEVEILLGLREDYEFDEILGGERSGDEPIGISVH

SEQ ID NO: 2217 - protein, 225 aa, Pyrococcus abyssi
MIRLPFRDGYYEVRPTKIIALAKNYAEHAREMGSEPPEEPVIFLKPPSALIGPNSVIVLPRRSKRVDHEVELAVIIGKRAKNVPAEKAFDYILGYTILLDITARDLQAEARKKGYPWTVSKGFDTFAPIGPRIVDKRELDPSDLEIGLKVNGKVRQLGRTSEMIFKIPELIEYISSIMTLEPGDIIATGTPPGVGPLRHGDKIEAWVEGIGVLEEEVIAEDSILC

SEQ ID NO: 2218 - protein, 1017 aa, Pyrococcus abyssi
MVAKGRIIRVTGPLVVADGMKGAKMYEVVRVGELGLIGEIIRLEGDKAVIQVYEETAGVRPGEPVIGTGSSLSVELGPGLLTSIYDGIQRPLEVIREKTGDFIARGVTAPALPRDKKWHFIPKVKVGDKVVGGDIIGEVPETSIITHKIMVPPGIEGEIVEIAEEGEYTIEEVIAKVKTPSGEIKELKMYQRWPVRVKRPYKEKLPPEVPLITGQRVIDTFFPQAKGGTAAIPGPFGSGKCVDGDTLVLTKEFGLIKIKDLYKILDGKGKKTVNGNEEWTELERPITLYGYKDGKIVEIKATHVYKGFSAGMIEIRTRTGRKIKVTPIHKLFTGRVTKNGLEIREVMAKDLKKGDRIIVAKKIDGGERVKLNIRVEQKRGKKIRIPDVLDEKLAEFLGYLIADGTLKPRTVAIYNNDESLLRRANELANELFNIEGKIVKGRTVKALLIHSKALVEFFSKLGVPRNKKARTWKVPKELLISEPEVVKAFIKAYIMCDGYYDENKGEIEIVTASEEAAYGFSYLLAKLGIYAIIREKIIGDKVYYRVVISGESNLEKLGIERVGRGYTSYDIVPVEVEELYNALGRPYAELKRAGIEIHNYLSGENMSYEMFRKFAKFVGMEEIAENHLTHVLFDEIVEIRYISEGQEVYDVTTETHNFIGGNMPTLLHNTVTQHQLAKWSDAQVVIYIGCGERGNEMTDVLEEFPKLKDPKTGKPLMERTVLIANTSNMPVAAREASIYTGITIAEYFRDMGYDVALMADSTSRWAEALREISGRLEEMPGEEGYPAYLASKLAEFYERAGRVVTLGSDYRVGSVSVIGAVSPPGGDFSEPVVQNTLRVVKVFWALDADLARRRHFPAINWLTSYSLYVDAVKDWWHKNVDPEWKAMRDKAMELLQKESELQEIVRIVGPDALPERERAILLVARMLREDYLQQDAFDEVDTYCPPEKQVTMMRVLLNFYDKTMEAISRGVPLEEIAKLPVREEIGRMKFEPDVGKIKALIDKTNEQFEELFKKYGA

SEQ ID NO: 2219 - protein, 357 aa, Pisum sativum
MAVKEATSETKKRSGYEIITLTSWLLQQEQKPIIDAELTIVLSSISMACKQIASLVQRANISNLTGTQGAVNIQGEDQKKLDVISNEVFSNCLRRSGRTGIIASEEEDVPVAVEESYSGNYIVVFDPLDGSSNLDAAVSTGSIFGIYSPNDECLPDFGDDSDDNTLGTEEQRCIVNVCQPGSNLLAAGYCMYSSSVIFVLTIGKGVFVFTLDPLYGEFVLTQENLQIPKSGKIYSFNEGNYKLWDENLKKYIDDLKEPGPSGKPYSARYIGSLVGDFHRTLLYGGIYGYPRDKKSKNGKLRLLYECAPMSFIVEQAGGKGSDGHQRVLDIQPTEIHQRVPLYIGSTEEVEKVEKYLA

SEQ ID NO: 2220 - protein, 186 aa, Nicotiana sylvestris
MASTLSTITLRSPSPSTATSTHASIPFPKKTLEFPIRTPKLQNRRATFLRPLAAVEAPEKVVQLGDEISNLTLADAQKLVEYLQDKLGVTAASFAPAAVVAAPGAAAEAPAVVEEKTEFDVVIDEVPSNARIATIKAVRALTSLALKEAKELIEGLPKKFKEGVSKDEAEDAKKQLEEAGAKVSIA

SEQ ID NO: 2221 - protein, 425 aa, Saccharomyces cerevisiae
MSGSTESKKQPRRRFIGRKSGNSNNDKLTTVAENGNEIIHKQKSRIALGRSVNHVPEDILNDKELNEAIKLLPSNYNFEIHKTVWNIRKYNAKRIALQMPEGLLIYSLIISDILEQFCGVETLVMGDVSYGACCIDDFTARALDCDFIVHYAHSCLVPIDVTKIKVLYVFVTINIQEDHIIKTLQKNFPKGSRIATFGTIQFNPAVHSVRDKLLNDEEHMLYIIPPQIKPLSRGEVLGCTSERLDKEQYDAMVFIGDGRFHLESAMIHNPEIPAFKYDPYNRKFTREGYDQKQLVEVRAEAIEVARKGKVFGLILGALGRQGNLNTVKNLEKNLIAAGKTVVKIILSEVFPQKLAMFDQIDVFVQVACPRLSIDWGYAFNKPLLTPYEASVLLKKDVMFSEKYYPMDYYEAKGYGRGETPKHAIE

SEQ ID NO: 2222 - protein, 425 aa, Brassica napus
MSKTTNQNRRPSFTSSTESSMRKRHGPSSSSSAVKPISNTAVMVAKKRAPLGNITNQRKDSRIFPNSSSADSAHCPNKSAKLKLAAPTQPVCVNACETKSTCEEEVVPIERKAFSNLCITPSSDTTTNVMSETENKEEKFMNIDNKDDADPQLYATFACDIYNHLRAAEAKKQPAVDYMETVQKDVNSTMRGILVDWLVEVSEEYRLVPETLYLTVNYIDRYLSGNVISRQKLQLLGVACMMIAAKYEEVCAPQVEEFCYITDNTYLKDEVLDMESAVLNYLKFEMSAPTVKCFLRRLFSGCPRVHEAPCMQLECMASYIAELSLLEYTMLSHPPSLVAASAIFLAKYTLDPTRRPWNSTLRHYTQYEAMELRGCVMDLQRLCSNAHVSTLPAVRDKYSQHKYKFVAKKFCPSIIPPDFFKNSLY

SEQ ID NO: 2223 - protein, 617 aa, Ashbya gossypii
MAGALENARKEIKRISLEDHNENEYGQIYSVSGPVVVAENMVGCAMYELVKVGHHNLVGEVIRLDGDKATIQVYEETAGVTVGDPVLRTGKPLSVELGPGLMETIYDGIQRPLKAIKEQSQSIYIPRGVDAPALSREVKWAFKPGKLGVGDHISGGDIFGSIFENSLLEDHKILLPPRARGTITWIAPAGEYTVDETVLEVEFDGKKYSYSMFHTWPVRVPRPVTEKLSADYPLLTGQRVLDSLFPCVQGGTTCIPGAFGCGKTVISQSLSKYSNSDAIIYVGCGERGNEMAEVLMEFPELFTEVNGRKEPIMKRTTLVANTSNMPVAAREASIYTGITLAEYFRDQGKNVSMIADSSSRWAEALREISGRLGEMPADQGFPAYLGAKLASFYERAGKAVALGSPDRVGSVSIVAAVSPAGGDFSDPVTTSTLGITQVFWGLDKKLAQRKHFPSINTSVSYSKYTNVLNKYYDSNYPEFPVLRDRIKEILSNAEELEQVVQLVGKSALSDKDKIVLDVATLIKEDFLQQNGYSTYDAFCPIWKTYDMMKAFVSYFDEAQKSVSNGANWAVLSEATGDVKHAVSSSKFFEPSRGEREVHAEFEKLFASIQERFAESTD

SEQ ID NO: 2224 - protein, 478 aa, Streptomyces coelicolor
MRRAKIVCTLGPATDSYDQIKDLVDAGMDIARFNFSHGTHAEHEERYHRVRKASDETGRSVGALADLQGPKIRLGHFGEGPVLLERGDSFTITVEEGVEGDRYICGTTYAGLAEDVTPGERVLVDDGKVCLEVTGVDGTRVRTRVIEGGMVSDHKGLNLPGVAVSVPALSKKDEDDLRWALRAGFDVVALSFVRSGRDILDVHRIMDEEGRRLPVIAKVEKPQAVENIEDIVAAFDGIMVARGDLGVEMPLEQVPTVQKRAVKLAKRNAKPVIVATQMLDSMIDNARPTRAEASDVANAVIDGTDAVMLSGETSVGKHPTDTVRTMARIVEAAEEDILAKGLPPLTERNKPRTQGGAVARAAAEMGDFLGAKFLVAFTQSGDTVRRLSRYRSPIPLLAFTPEPATRSQLSLTWGVETFLGPHADSTDAMVDQVDELLTRYGRCEKGDVVVITAGSPPGVSGTTNLVRVHHIGEDDIPK

SEQ ID NO: 2225 - protein, 727 aa, Physcomitrella patens
MAACTIVWFRRDLRLEDNPALIAAARAGTVVPVFVWSPAEDGQFHPGRVSRWWLKQSLTHLELSLKKLGSPLILRKSPDTLSVLLEIAEATGATQVFYNHLYDPVSLVRDHRVKQGLSQRGIVVHTFNGDLLYEPWEVYDEEGQAFTVYEAFWKKCMSMPFEPEAPLLPPRRLTGPIGKIVGCNAEELGLEDEFEKSSNALLARAWCPGWGFANKSLDSFLRSPLIDYARDRQKADGASGTPTSLLSPHLHFGELSVRKIFHEVRKRQITWAREGNAGGEASVNMFLRALGFREYSRYLSFHFPFTHERSLLANLKSFPWRADEGYFKAWRQGRTGYPLVDAGMRELWATGWAHNRIRVVVASFSVKFLQLPWRWGMKYFWDVLLDADLECDVLGWQYISGSLPDGHELDRIENPEVEGYRFDPDGDYVRRWIPELARLPNEWVHHPWDAPPSALRAAGVELGTNYPRPIVEIGAARERLQASLAEMWERDAAMKAALANGLEEGLGETVEVAGTGGPEHERMDVPRVMVHMQRDADMSCNSSRRDQLVPEIVPNQFHIRAHESIMNRSAAMVEDGEEAGRAAVPMVFASVRRGMGGNYGGHHVEGNGGEVAQASAPIQWPTVTAVDYELDSTAESASVTGRGGSEGGTVPVWSQSVSARTPIQVREGLVPEVRRGPGLSRRQLQASVQRVNLEGMTSNKQAEEEDFYVPKLVKWTQPRKRRVKQDG

SEQ ID NO: 2226 - protein, 495 aa, Glycine max
ATSDSNMLLNYVPVYVMLPLGVVNVDNVFEDPDGLKEQLLQLRAAGVDGVMVDVWWGIIELKGPKQYDWRAYRSLFQLVQECGLTLQAIMSFHQCGGNVGDIVNIPIPQWVLDIGESNHDIFYTNRSGTRNKEYLTVGVDNEPIFHGRTAIEIYSDYMKSFRENMSDFLESGLIIDIEVGLGPAGELRYPSYPQSQGWEFPRIGEFQCYDKYLKADFKAAVARAGHPEWELPDDAGKYNDVPESTGFFKSNGTYVTEKGKFFLTWYSNKLLNHGDQILDEANKAFLGCKVKLAIKVSGIHWWYKVENHAAELTAGYYNLNDRDGYRPIARMLSRHHAILNFTCLEMRDSEQPSDAKSGPQELVQQVLSGGWREDIRVAGENALPRYDATAYNQIILNAKPQGVNNNGPPKLSMFGVTYLRLSDDLLQKSNFNIFKKFVLKMHADQDYCANPQKYNHAITPLKPSAPKIPIEVLLEATKPTLPFPWLPETDMKVDG

SEQ ID NO: 2227 - protein, 896 aa, Saccharomyces cerevisiae
MTTTAQDNSPKKRQRIINCVTQLPYKIQLGESNDDWKISATTGNSALFSSLEYLQFDSTEYEQHVVGWTGEITRTERNLFTREAKEKPQDLDDDPLYLTKEQINGLTTTLQDHMKSDKEAKTDTTQTAPVTNNVHPVWLLRKNQSRWRNYAEKVIWPTFHYILNPSNEGEQEKNWWYDYVKFNEAYAQKIGEVYRKGDIIWIHDYYLLLLPQLLRMKFNDESIIIGYFHHAPWPSNEYFRCLPRRKQILDGLVGANRICFQNESFSRHFVSSCKRLLDATAKKSKNSSNSDQYQVSVYGGDVLVDSLPIGVNTTQILKDAFTKDIDSKVLSIKQAYQNKKIIIGRDRLDSVRGVVQKLRAFETFLAMYPEWRDQVVLIQVSSPTANRNSPQTIRLEQQVNELVNSINSEYGNLNFSPVQHYYMRIPKDVYLSLLRVADLCLITSVRDGMNTTALEYVTVKSHMSNFLCYGNPLILSEFSGSSNVLKDAIVVNPWDSVAVAKSINMALKLDKEEKSNLESKLWKEVPTIQDWTNKFLSSLKEQASSNDDMERKMTPALNRPVLLENYKQAKRRLFLFDYDGTLTPIVKDPAAAIPSARLYTILQKLCADPHNQIWIISGRDQKFLNKWLGGKLPQLGLSAEHGCFMKDVSCQDWVNLTEKVDMSWQVRVNEVMEEFTTRTPGSFIERKKVALTWHYRRTVPELGEFHAKELKEKLLSFTDDFDLEVMDGKANIEVRPRFVNKGEIVKRLVWHQHGKPQDMLKGISEKLPKDEMPDFVLCLGDDFTDEDMFRQLNTIETCWKEKYPDQKNQWGNYGFYPVTVGSASKKTVAKAHLTDPQQVLETLGLLVGDVSLFQSAGTVDLDSRGHVKNSESSLKSKLASKAYVMKRSASYTGAKV

SEQ ID NO: 2228 - protein, 124 aa, Brucella melitensis
MADLAKIVEDLSALTVLEAAELSKLLEEKWGVSAAAPVAVAAAGGAAPAAAAEEKTEFDVVLADGGANKINVIKEVRALTGLGLKEAKDLVEGAPKAVKEGASNDEAEKIKAQLEAAGAKVELK

SEQ ID NO: 2229 - protein, 572 aa, Bacillus subtilis
MSKVIGIDLGTTNSCVAVLEGGEPKVIANAEGNRTTPSVVAFKNGERQVGEVAKRQSITNPNTIMSIKRHMGTDYKVEIEGKDYTPQEVSAIILQHLKSYAESYLGETVSKAVITVPAYFNDAERQATKDAGKIAGLEVERIINEPTAAALAYGLDKTDEDQTILVYDLGGGTFDVSILELGDGVFEVRSTAGDNRLGGDDFDQVIIDHLVSEFKKENGIDLSKDKMALQRLKDAAEKAKKDLSGVSSTQISLPFITAGEAGPLHLELTLTRAKFEELSSHLVERTMGPVRQALQDAGLSASEIDKVILVGGSTRIPAVQEAIKKETGKEAHKGVNPDEVVALGAAIQGGVITGDVKDVVLLDVTPLSLGIETMGGVFTKLIDRNTTIPTSKSQVFSTAADNQTAVDIHVLQGERPMSADNKTLGRFQLTDIPPAPRGVPQIEVSFDIDKNGIVNVRAKDLGTGKEQNITIKSSSGLSDEEIERMVKEAEENADADAKKKEEIEVRNEADQLVFQTEKTLKDLEGKVDEEQVKKANDAKDALKAAIEKNEFEEIKAKKDELQTIVQELSMKL

SEQ ID NO: 2230 - protein, 187 aa, Enterococcus hirae
MQIGKIIKVSGPLVMAENMSEASIQDMCLVGDLGVIGEIIEMRQDVASIQVYEETSGIGPGEPVRSTGEALSVELGPGIISQMFDGIQRPLDTFMEVTQSNFLGRGVQLPALDHEKQWWFEATIEEGTEVSAGDIIGYVDETKIIQHKIMVPNGIKGTVQKIESGSFTIDDPICVIETEQGLKELTM

SEQ ID NO: 2231 - protein, 943 aa, Oryza sativa; identical to SEQ ID NO: 756

SEQ ID NO: 2232 - protein, 675 aa, Pisum sativum
MAATLLRSLQRRNLSSSSVSAFRSLTGSTKTSYATHKLASLTRPFSSRPAGNDVIGIDLGTTNSCVSVMEGKNPKVIENSEGARTTPSVVAFNQKSELLVGTPAKRQAVTNPTNTLFGTKRLIGRRFDDAQTQKEMKMVPYKIVRAPNGDAWVEANGQQYSPSQIGAFVLTKIKETAEAYLGKTISKAVVTVPAYFNDAQRQATKDAGRIAGLDVQRIINEPTAAALSYGMNNKEGLIAVFDLGGGTFDVSILEISNGVFEVKATNGDTFLGGEDFDNALLDFLVSEFKRTESIDLAKDKLALQRLREAAEKAKIELSSTSQTEINLPFISADASGAKHLNITLTRSKFEALVNNLIERTKAPCKSCLKDANISIKDVDEVLLVGGMTRVPKVQQVVSEIFGKSPSKGVNPDEAVAMGAALQGGILRGDVKELLLLDVTPLSLGIETLGGIFTRLISRNTTIPTKKSQVFSTAADNQTQVGIKVLQGEREMAADNKSLGEFDLVGIPPAPRGLPQIEVTFDIDANGIVTVSAKDKSTGKEQQITIRSSGGLSDDEIDKMVKEAELHAQRDQERKALIDIRNSADTSIYSIEKSLAEYREKIPAEVAKEIEDAVSDLRTAMAGENADDIKAKLDAANKAVSKIGQHMSGGSSGGPSEGGSQGGEQAPEAEYEEVKK

SEQ ID NO: 2233 - protein, 682 aa, Solanum tuberosum
MATAALLRSLRRREFATSSISAYRTLASNTKPSWCPSLVGAKWAGLARPFSSKPAGNEIIGIDLGTTNSCVAVMEGKNPKVIENSEGARTTPSVVAFNQKGELLVGTPAKRQAVTNPTNTLSGTKRLIGRRFDDPQTQKEMKMVPYKIVRGSNGDAWVEANGQQYSPTQIGAFILTKMKETAEAYLGKSINKAVITVPAYFNDAQRQAIKDAGAIAGLDVQRIINEPTAAALSYGMNSKEGLVAVFDLGGGTFDVSILEISNGVFEVKATNGDTFLGGEDFDNALLEFLVSEFKRTEGIDLSKDKLALQRLREAAEKAKIELSSTSQTDINLPFITADASGAKHLNITLTRSKFETLVNHLIERTRNPCKNCLKDAGVSLKDVDEVLLVGGMTRVPKVQEIVSEIFGKSPSKGVNPDEAVAMGAALQGGILRGDVKELLLLDVTPLARGIETLGGIFTRLINRNTTIPTKKSQVFSTAADNQTQVGIKVLQGEREMASDNKLLGEFDLVGIPPAPKGYCPQIEVIFDIDANGMVTVSAKDKATSKEQQITIRSSGGLSEDEIDKMVREAEMHAQRIKNARHLLISGIVQSTTIYSIEKSLSEYKEKVPKEVVTEIETAISDLRAAMGTENIDDIKAKLDAANKAVSKIGEHMAGGSSGGASGGGGAQGGDQPPEAEYEEVKK

SEQ ID NO: 2234 - protein, 488 aa, Kluyveromyces lactis
MVNQDISKLSLNECPGSVIVISNRLPVTIKKDEKTGEYEYSMSSGGLVTALQGLKKSTTFQWYGWPGLEVPDEDKAKVKRELLEKFNAIPIFLSDEVADLHYNGFSNSILWPLFHYHPGEITFDDTAWLAYNEANMAFADEIEGNINDNDVVWVHDYHLMLLPEMIRQRVIAKKLKNIKIGWFLHTPFPSSEIYRILPVRQEILKGVLSCDLIGFHTYDYARHFLSAVQRILNVNTLPNGVEFDGRFVNVGAFPIGIDVETFTEGLKQDAVIKRIKELKESFKGCKIIIGVDRLDYIKGVPQKLHALEVFLGAHPEWIGKVVLVQVAVPSRGDVEEYQYLRSVVNELVGRINGQFGTAEFVPIHFMHRSIPFQELISLYAVSDVCLVSSTRDGMNLVSYEYISCQEEKKGTLILSEFTGAAQSLNGALIVNPWNTDDLAESINEALTVPEEKRAANWEKLYKYISKYTSAFWGENFVHELYRLGSSNN

SEQ ID NO: 2235 - protein, 615 aa, Scherffelia dubia
MGRDSETREKDYGVIKKVSGPVVVADKIAGAGCYELVRVGDQNLIGEIIRLEGDTATIQCYEETAGLQVGDIVKRTYSPLAVELGPGLLGQIFDGIQRPLKAIAEASGDCFIPRGVSVPSLDRSHMWEFIPGALRMGDLATGGDIYGLVHENTLLDHRIMLPPGAKGRISYIAPPGQYTITEKVIELEFQGVKKEYSMMNLWPVRSPRPVAQKLLGSTPLLTGQRVLDAFFPSVLGGTCAIPGAFGCGKTVISQALSKFSNSDGIIYVGCGERGNEMAEVLYEFPALTMTMPDGREESIMKRTTLVANTSNMPVAAREASIYTGITLAEYFRDMGYNFSMMADSTSRWAEALREISGRLAEMPADSGYPAYLGARLASFYERSGRVKCLGSPGREGSVTIVGAVSPPGGDFSDPVTSATLGIVQVFWGLDKKLAQRKHLPSVNWLISYSKYEKSLEPFYEGFDSEFASIRRKAKDILAKEDGLNEIVQLVGKDALAESNKIILETARLIKEDYLQQNSFTKYDKYCPFYKAVLMLKNMVLFYDLSNAAVEKTMSSTDASKITLSIIKNRLGNLMYSLVSMKFEDPADGEEVVKGRLVELGNQLRDAFRSLEEEYR

SEQ ID NO: 2236 - protein, 530 aa, Agaricus bisporus
PVDGIRSQIEWNTTLNVSDAPVPTETTKYHRKTAIIATIGPKINTVEKLTDVRLAGVNIVRMNFSHGTHEYHQSVIDNTRQMIKNDPHGRPVAIALDTKGPEIRTGQTRDGNDYPIKAGDEFIVTTDPKYSDICDNKVLFVDYANLASVTAPGKLIYIDDGIISLLILSIDGMNLHVRALNNGTLSSRKGVNLPKTDVDLPPLSEKDKDDLRFGIRNGVDMIFASFIRRGEDVRQIREVLGPDGASIKIIVKIENEQGVANFDEILKEADGVMVARGDLGIEIPASQVFLAQKMMIAKCNIVGKPVIVATQMLESMTYNPRPTRAEVSDVANAVLDGSDCVMLSGETAKGSYPVQSVLMMAETCLLAETAICYPPLYDDLRAVQARPTETAETVAIAAVAAAAEQDAKALLVLSTSGETARLVSKYRPKIPIITVTRNEQTARQIHLHRGCYPFWYPEPRGVQNHQWQTDVDNRIRFGLRNALALNVIQPGASIIAVQGWKGGLGHTNTLRILTVPTDPADLELQPLGSL

SEQ ID NO: 2237 - protein, 644 aa, Saccharomyces cerevisiae
MLPSWKAFKAHNILRILTRFQSTKIPDAVIGIDLGTTNSAVAIMEGKVPRIIENAEGSRTTPSVVAFTKDGERLVGEPAKRQSVINSENTLFATKRLIGRRFEDAEVQRDINQVPFKIVKHSNGDAWVEARNRTYSPAQIGGFILNKMKETAEAYLAKSVKNAVVTVPAYFNDAQRQATKDAGQIIGLNVLRVVNEPTAAALAYGLDKSEPKVIAVFDLGGGTFDISILDIDNGIFEVKSTNGDTHLGGEDFDIYLLQEIISHFKKETGIDLSNDRMAVQRIREAAEKAKIELSSTLSTEINLPFITADAAGPKHIRMPFSRVQLENITAPLIDRTVDPVKKALKDARITASDISDVLLVGGMSRMPKVADTVKKLFGKDASKAVNPDEAVALGAAIQAAVLSGEVTDVLLLDVTPLSLGIETLGGVFTKLIPRNSTIPNKKSQIFSTAASGQTSVEVKVFQGERELVKDNKLIGNFTLAGIPPAPKGTPQIEVTFDIDANGIINVSAKDLASHKDSSITVAGASGLSDTEIDRMVNEAERYKNQDRARRNAIETANKADQLANDTENSIKEFEGKLDKTDSQRLKDQISSLRELVSRSQAGDEVNDDDVGTKIDNLRTSSMKLFEQLYKNSDNPETKNGRENK

SEQ ID NO: 2238 - protein, 889 aa, Arabidopsis thaliana
MSGLFHVVRSQNRTTATTDPDEARALNKIFRTWKITATKAWNISGELCSGAAIDDSVSIDNLAFNPLIKCDCSFVDSTICRIVALRARGMDVAGPIPDDLWTLVYISNLNLNQNFLTGPLSPGIGNLTRMQWIAIDMNNFSGSLPPEIGNCTRLVKMYIGSSGLSGEIPSSFANFVNLEEAWINDIRLTGQIPDFIGNWTKLTTLVLRNNNLTGTIPSNIGDYLGLRQLDLSFNKLTGQIPAPLFNSRQLTHLDVSYNDLTGDLPSWVRLPNLQLALPRLDCLQKDFRCNRGKGVYFNFFVNCGGRDIRSSSGALYEKDEGALGPATFFVSKTQRWAVSNVGLFTGSNSNQYIALSATQFANTSDSELFQSARLSASSLRYYGLGLENGGYSVTVQFAEIQIQGSNTWKSLGRRIFDIYVQGKLVEKDFDMQKAANGSSIRVIQRVYKANVSENYLEVHLFWAGKGTCCIPAQGTYGPLVSAISATPDFIPTVKNKLPSKSKKNIVIIVGAIVGAGMLCILVIAILLFIRRKRKRAADEEVLNSLHIRPYTFSYSELRTATQDFDPSNKLGEGGFGPVFKGKLNDGREIAVKQLSVASRQGKGQFVAEIATISAVQHRNLVKLYGCCIEGNQRMLVYEYLSNKSLDQALFEEKSLQLGWSQRFEICLGVAKGLAYMHEESNPRIVHRDVKASNILLDSDLVPKLSDFGLAKLYDDKKTHISTRVAGTIGYLSPEYVMLGHLTEKTDVFAFGIVALEIVSGRPNSSPELDDDKQYLLEWAWSLHQEQRDMEVVDPDLTEFDKEEVKRVIGVAFLCTQTDHAIRPTMSRVVGMLTGDVEITEANAKPGYVSERTFENAMSFMSGSTSSSWILPETPKDSSKSQVEEHGRRH

SEQ ID NO: 2239 - protein, 1086 aa, Arabidopsis thaliana
MLRLWRYLCLLLTVWFLCNFGPVYVVRAQNRTGATTHPDEGLSSSSLNNLTSSNSIDRIEDCVASASFELNFRGLEDSGAEGMEHQRRTLLRRRYRRQCSRLKPCLQSSHQMRLQFRKLHNLPHYQHQGLCDGSCRIYTSTTLDLGIPDKSVWFYYHLMIIQFQLQKEHTFSQFKITSFRNLGQNVLTGSLPPALGNLTRMRWMTFGINALSGPIPKEIGLLTDLRLLSISSNNFSGSIPDEIGRCTKLQQIYIDSSGLSGGLPVSFANLVELEQAWIADMELTGQIPDFIGDWTKLTTLRILGTGLSGPIPASFSNLTSLTELRLGDISNGNSSLEFIKDMKSLSILVLRNNNLTGTIPSNIGEYSSLRQLDLSFNKLHGTIPASLFNLRQLTHLFLGNNTLNGSLPTQKGQSLSNVDVSYNDLSGSLPSWVSLPNLNLNLVANNFTLEGLDNRVLSGLNCLQKNFPCNRGKGIYSDFSINCGGPEIRSVTEAVFEREDEDLGPASFVVSAGQRWAASSVGLFAGSSNNIYISTSQSQFVNTLDSELFQSARLSASSLRYYGLGLENGGYTVTLQFAEIQILGSTSNTWRGLGRRRFDIYVQGRLVEKDFDVRRTAGDSTVRAVQREYKANVSQNHLEIHLFWAGKGTCCIPIQGAYGPLISAVGATPDFTPTVGNRPPSKGKSMTGTIVGVIVGVGLLSIISGVVIFIIRKRRKRYTDDEEILSMDVKPYTFTYSELKSATQDFDPSNKLGEGGFGPVYKGKLNDGREVAVKLLSVGSRQGKGQFVAEIVAISAVQHRNLVKLYGCCYEGEHRLLVYEYLPNGSLDQALFGEKTLHLDWSTRYEICLGVARGLVYLHEEARLRIVHRDVKASNILLDSKLVPKVSDFGLAKLYDDKKTHISTRVAGTIGYLAPEYAMRGHLTEKTDVYAFGVVALELVSGRPNSDENLEDEKRYLLEWAWNLHEKGREVELIDHQLTEFNMEEGKRMIGIALLCTQTSHALRPPMSRVVAMLSGDVEVSDVTSKPGYLTDWRFDDTTASSISGFPLRNTQASESFTSFVAPRSEISPRNNDARPMLGAQMNEGR

SEQ ID NO: 2240 - protein, 466 aa, Arabidopsis thaliana
MDVPRPAFKCFDDDGRLKRSGTVWTASAHIITAVIGSGVLSLAWAIGQLGWIAGPTVMLLFSFVTYYSSTLLSDCYRTGDPVSGKRNYTYMDAVRSILGGFRFKICGLIQYLNLFGITVGYTIAASISMMAIKRSNCFHESGGKNPCHMSSNPYMIMFGVTEILLSQIKDFDQIWWLSIVAAIMSFTYSAIGLALGIIQVAANGVVKGSLTGISIGAVTQTQKIWRTFQALGDIAFAYSYSVVLIEIQDTVRSPPAESKTMKIATRISIAVTTTFYMLCGCMGYAAFGDKAPGNLLTGFGFYNPFWLLDVANAAIVIHLVGAYQVFAQPIFAFIEKQLAARFPDSDLVTKEYEIRIPGFRSPYKVNVFRAVYRSGFVVLTTVISMLMPFFNDVVGILGALGFWPLTVYFPVEMYIRQRKVERWSMKWVCLQMLSCGCLMITLVAGVGSIAGVMLDLKVYKPFKTTY

SEQ ID NO: 2241 - protein, 480 aa, Arabidopsis thaliana
MVVQNVQDLDVLPKHSSDSFDDDGRPKRTGTVWTASAHIITAVIGSGVLSLAWAVAQIGWIGGPVAMLLFSFVTFYTSTLLCSCYRSGDSVTGKRNYTYMDAIHSNLGGIKVKVCGVVQYVNLFGTAIGYTIASAISLVAIQRTSCQQMNGPNDPCHVNGNVYMIAFGIVQIIFSQIPDFDQLWWLSIVAAVMSFAYSAIGLGLGVSKVVENKEIKGSLTGVTVGTVTLSGTVTSSQKIWRTFQSLGNIAFAYSYSMILIEIQDTVKSPPAEVNTMRKATFVSVAVTTVFYMLCGCVGYAAFGDNAPGNLLAHGGFRNPYWLLDIANLAIVIHLVGAYQVYCQPLFAFVEKEASRRFPESEFVTKEIKIQLFPGKPFNLNLFRLVWRTFFVITTTLISMLMPFFNDVVGLLGAIGFWPLTVYFPVEMYIAQKNVPRWGTKWVCLQVLSVTCLFVSVAAAAGSVIGIVSDLKVYKPFQSEF

SEQ ID NO: 2242 - protein, 437 aa, Petunia x
MNTNRAVLVPHRGEVGGKQKNGQADGRNNRRVLGDIGNLVTGAPVIEGKPKAQISRPATRSFCAQLLANAQAEKNKVKPLAEVVNKVPAKKKASDKPAVQEAVIVISPDEEVKKKTIEKSPLSKRKAKKTGKTLTSTLTARSKAACGLSNRPKNEIDDIDAADAANHLAVVEYVEDIYNFYKLTEDESRVNNYMEFQPELNHKMRAILVDWLIEVHRKFELMPESLYLTINILDRFLSMKTVPRKELQLVGISAMLIACKYEEIWAPEVNDFMHISDNVYTRDHILQMEKAILGKLEWYLTVPTPYVFLVRYIKAAMPSDDQEIQNMAFFFAELGLMNYTTTISYCPSMLAASAVYAARGTLNKGPLWTPTLQHHTGYSEEQLMECTKQLVSYHKGAAESKLKAIYRKFSSPDRGAVALFPPARNLLPTTTTTTTSS

SEQ ID NO: 2243 - protein, 433 aa, Haloferax volcanii
MRNRTYTADAEPGDTVTVAGWVHEVRDLGGIAFLILRDTSGKIQVKFEKDEMDDDLVETGLGVHRESVISVTGEVDEEPRAPTGVEVTPESLDVIAEAEAQLPLDPSGKVDAELSTRLDNRTLDLRKDEVKAIFEIRAEVQRAVRDKFRDLRATEINTPKIVATGTEGGTELFPITYFGQEAFMNQSPQLFKQLMVGSGLERVFEVGPIFRAEEHNTPRHLNEATSIDFESAFIDHTEAMDVCEAVVTAAYEAVEENCQDELEALGLEEEFERRPRVPAAHLRGGHRAHQRTGELDEQLVWGDDLPTEGEKALGEDVGEHYFITDWPSEIKPFYIKDHDDDETLSTGFDMMHPNMELVSGGQREHRFDHLVAGFEQQGLDPDAFEYYTKMFKYGMPPHAGFGLGGERLIMTMLGLENIREAVLFPRDRQRLSP

SEQ ID NO: 2244 - protein, 413 aa, Photobacterium profundum
MSKRRVVVTGMGMLTPVGNSVESSWKALLSGTSGISTIEHFDASLFATQFAGMIKDFNPEEYMTKKDARKMDLFIQYGIAAGVQAFKDSGIEVTEENAHRIGVAIGSGIGGLGLIEAGHQALMEKGPRKISPFFVPSTIVNMIAGHMSIMHGLRGPNIAISTACTTGLHNIGHAARMIAYGDADAMLAGGAEKASTELGMGGFAAAKALSTRNDDPQAASRPWDKDRDGFVLGDGAGVIVVEEYEHAKARGATIYAELVGFGMSGDAYHMTSPSPDGSGGALAMEATLRDAGINADKIGYINAHGTSTPAGDAAETRGIKRAMGTAADDVLVSSTKSMTGHLLGAAGSVEAIISIMSLVDQAVPPTINLDNPDEGCDLDYVAGEARQVKNLEYSLCNSFGFGGTNGSLLFKKI

SEQ ID NO: 2245 - protein, 158 aa, Arabidopsis thaliana
MASKSSFMATFNIVTLMLMVASSTVTARPLMKPSMGTSSPTTSLVYRLKLDEDTGYCWDSLMQLQHCSGELILFFLNGETYIGPGCCSAIRTIGRKCWPTMIGVLGFTAQEGDMLQGYCDGNDSDNNGEDHALASSTLPLSVNFKTTVVRSSASPSNP

SEQ ID NO: 2246 - protein, 426 aa, Mycobacterium tuberculosis
MARIGDGGDLLKCSFCGKSQKQVKKLIAGPGVYICDECIDLCNEIIEEELADADDVKLDELPKPAEIREFLEGYVIGQDTAKRTLAVAVYNHYKRIQAGEKGRDSRCEPVELTKSNILMLGPTGCGKTYLAQTLAKMLNVPFAIADATALTEAGYVGEDVENILLKLIQAADYDVKRAETGIIYIDEVDKIARKSENPSITRDVSGEGVQQALLKILEGTQASVPPQGGRKHPHQEFIQIDTTNVLFIVAGAFAGLEKIIYERVGKRGLGFGAEVRSKAEIDTTDHFADVMPEDLIKFGLIPEFIGRLPVVASVTNLDKESLVKILSEPKNALVKQYIRLFEMDGVELEFTDDALEAIADQAIHRGTGARGLRAIMEEVLLPVMYDIPSRDDVAKVVVTKETVQDNVLPTIVPRKPSRSERRDKSA

SEQ ID NO: 2247 - protein, 290 aa, Clarkia xantiana
MSLTSRLYKPRLFSLPSQHSFRALPILSPPLRSSCIPAPLSVRASLSTRSIATSIAMGEAAADAGMDAVQRRLMFDDECILVDEVDCVVGHESKYNCHLWEKIESGNMLHRAFTVFLFNSKFELLLQQRSATKVTFPLVWTNTCCSHPLYRESELIDENNLGVRNAAQRKLLDELGIPAEDVPVDEFTPVSRMLYKAPSDGKWGEHELDYLLFIVRDVGIHPNPDEVADIKYVNREQLKELLRKADAGEEGLKLSPWFRLVVDNFLPKWWDHVEKGTLSEAVDMKTIHNL

SEQ ID NO: 2248 - protein, 650 aa, Burkholderia cepacia
MGKIIGIDLGTTNSCVAIMEGNQVKVIENSEGTRTTPSIIAYMDDNEVLVGAPAKRQSVTNPKNTLFAVKRLIGRRFEEKEVQKDIGLMPYSIIKADNGDAWVEGHGEKLMAPPQVSAEAVRKMKKTAEDYLGEPVTEAVITVPAYFNDSQRQATKDAGRIAGLEVKRIINEPTAAALAFGLDKAEKGDRKIAVYDLGGGTFDVSIIEIADVDGEMQFEVLSTNGDTFLGGEDFDQRIIDYIIGEFKKEQGVDLSKDVLALQRLKEAAEKAKIELSSSQQTEINLPYITADASGPKHLNLKITRAKLEALVEDLVERTIEPCRIAIKDAGVKVSDIDDVILVGGQTRMPKVMEKVKEFFGKDPRRDVNPDEAVAVGAAIQGQVLSGDRKDVLLLDVTLSLGIETVGGVMTKMISKNTTIPTKHAQVYSTADDNQGAVTIKVFQGEREMAAGNKLLGEFNLEGIPPAPRGVPQIEVTFDIDANGILHVGAKDKATGKENKITIKANSGLSEAEIDQMIKDAEANAAEDHNVRELADSRNQGDALVHSTKKALTEYGDKLDAGEKEALEASLKSLEEVLKDTSADKAAIDAKVEELGKVSQKLGEKMYADMQAQQAGAAGAAGAAEGAAHAGGAQQAADDVVDAEFKEVKKD

SEQ ID NO: 2249 - protein, 641 aa, Sinorhizobium meliloti
MAKVIGIDLGTTNSCVSVMDGKDAKVIENAEGARTTPSMVAFTEDGERLVGQPAKRQAVTNPENTLFAIKRLIGRTFEDPTTQKDKGMVPYKIVKADNGDAWVEAHGTSYSPSQISAMILQKMKETAESYLGEKVEKAVITVPAYFNDAQRQATKDAGKIAGLDVLRIINEPTAAALAYGLDKKEGKTIAVYDLGGGTFDISVLEIGDGVFEVKSTNGDTFLGGEDFDMRLVEYLASEFKKEQGIDLKNDKLALQRLKEAAEKAKIELSSSQQTEINLPFITADASGPKHLTMKLSRAKFESLVEDLIQKTIAPCKAALKDAGVSAAEIDEVVLVGGMTRMPKVQETVKQLFGKEPHKGVNPDEVVAMGAAIQAGVLQGDVKDVLLLDVTPLSLGIETLGGVFTVLIERNTTIPTKKSQVFSTADDNQSAVTIRVSQGEREMAADNKLLGQFDLVGIPPAPRGVPQIEVTFDIDANGIVQVSAKDKGTGKEHQIRIQASGGLSDAEIEKMVKDAEANAEADKKRREGVEAKNQAESLVHSSEKSLQEHGDKVSETDRKAIEDAIAALKSRVEVSEPDAEDIKAKTNTLMEVSMKLGQAIYEAQQTDAAHAMPPPDAKRSGDDVVDADYEEVKDEDDRKRSA

SEQ ID NO: 2250 - protein, 632 aa, Taraxacum officinale
MASSTTAATPLILHNDSTPRRRLSLAKLLSGIPVAVLVIFALVTVILNQSQHTSATGNIDFHGGDKPSSDTTFTEMVPEELKQVLIKLESNAGVEWERSAYHFQPDKNFISDPDGPMYHMGWYHLFYQYNPESAIWGNITWGHSISRDMINWFHLPFAMVPDHWYDIEGVMTGSATMLPDGQIIMLYTGNAYDLAQLQCLAYAVNSSDPLLLEWKKYEGNPILFPPPGVGYKDFRDPSTLWRGPDGDWIMIMGSKHNQTIGCALVYRTSNFTHFELSEEPLHAVPHTGMWECVDLYPVSTTHTNGLDMMDNGPNVKYILKQSGDEDRHDWYAIGSFDPINDKWYPDDPENDVGIGLRYDYGKFYASKTFYDQHKSRRVLWGYVGETDPPKDDLLKGWANMLNIPRTIVLDTVTGTNLIQWPIDEVENLRSKKYDEFKDVELRPGSIIPLEIGSATQLDIMATFEIDEKMLESTLEADVLFNCTTSEGSVGRGVLGPFGIVVLADAKRSEQLPVYFYIAKNTDGSSKTYFCADESRSSMDKSVGKWVYGDSVPVLEGEKHNMRLLVDHSIVEGFAQGGRTVVTSRVYPTKAIYGAAKLFLFNNATGISVKASLKIWKMAEAQLDPFPLSGWSS

SEQ ID NO: 2251 - protein, 681 aa, Arabidopsis thaliana
MSGSVSGCGSGGCSIVWFRRDLRVEDNPALAAAVRAGPVIALFVWAPEEEGHYHPGRVSRWWLKNSLAQLDSSLRSLGTCLITKRSTDSVASLLDVVKSTGASQIFFNHLYDPLSLVRDHRAKDVLTAQGIAVRSFNADLLYEPWEVTDELGRPFSMFAAFWERCLSMPYDPESPLLPPKKIISGDVSKCVADPLVFEDDSEKGSNALLARAWSPGWSNGDKALTTFINGPLLEYSKNRRKADSATTSFLSPHLHFGEVSVRKVFHLVRIKQVAWANEGNEAGEESVNLFLKSIGLREYSRYISFNHPYSHERPLLGHLKFFPWAVDENYFKAWRQGRTGYPLVDAGMRELWATGWLHDRIRVVVSSFFVKVLQLPWRWGMKYFWDTLLDADLESDALGWQYITGTLPDSREFDRIDNPQFEGYKFDPNGEYVRRWLPELSRLPTDWIHHPWNAPESVLQAAGIELGSNYPLPIVGLDEAKARLHEALSQMWQLEAASRAAIENGSEEGLGDSAEVEEAPIEFPRDITMEETEPTRLNPNRRYEDQMVPSITSSLIRPEEDEESSLNLRNSVGDSRAEVPRNMVNTNQAQQRRAEPASNQVTAMIPEFNIRIVAESTEDSTAESSSSGRRERSGGIVPEWSPGYSEQFPSEENRIGGGSTTSSYLQNHHEILNWRRLSQTG

SEQ ID NO: 2252 - protein, 367 aa, Saccharomyces cerevisiae
MQRNSLVNIKLNANSPSKKTTTRPNTSRINKPWRISHSPQQRNPNSKIPSPVREKLNRLPVNNKKFLDMESSKIPSPIRKATSSKMIHENKKLPKFKSLSLDDFELGKKLGKGKFGKVYCVRHRSTGYICALKVMEKEEIIKYNLQKQFRREVEIQTSLNHPNLTKSYGYFHDEKRVYLLMEYLVNGEMYKLLRLHGPFNDILASDYIYQIANALDYMHKKNIIHRDIKPENILIGFNNVIKLTDFGWSIINPPENRRKTVCGTIDYLSPEMVESREYDHTIDAWALGVLAFELLTGAPPFEEEMKDTTYKRIAALDIKMPSNISQDAQDLILKLLKYDPKDRMRLGDVKMHPWILRNKPFWENKRL

SEQ ID NO: 2253 - protein, 1054 aa, Saccharomyces cerevisiae
MTIIVASLFLPYTPQFEADVTNSDTAKLVESSMIKVDCNNQELSNNKQERSSSVTSASSHYIGLPQEAQINGEPLQRANVGSPATGVNYHNEMEMLSSEQFLEELTANATHAANSGIPPANNPVSSGSTAQRPSVEEFFSAPSARVCSPSQEASASSISASRSSAHHNDLSSSLMKNPNLSFDSHPPRVRSSSKSAVITPVSKSVPDVDPAVVDVAKVREEFQQQASLPSMKRVSGSTAGDSSIASSSSNLRYSQQFQDNFIEDTDSEDDIDSDLETDATKKYNVPKFGGYSNNAKLRASLMRNSYELFKHLPWTIVDSDKGNGSLKNAVNIAVAEKTVKEPVSWVGTMGIPTDELPHEVCHKISKKLEQDFSSFPVVTDDITFKGAYKNYAKQILWPTLHYQIPDNPNSKAFEDHSWDYYQKVNQKFSDRIVSVYKPGDTIWIHDYHLMLVPQMVREKLPKAKIGFFLHVSFPSSEVFRCLANRERILEGIIGANFVGFQTKEYKRHFLQTCNRLLAADVSNDEVKYHCNIVSVMYAPIGIDYYHLTSQLRNGSVLEWRQLIKERWRNKKLIVCRDQFDRIRGLQKKMLAYERFLIENPEYIEKVVLIQICIGKSSDPEYERQIMVVVDRINSLSSNISISQPVVFLHQDLDFAQYLALNCEADVFLVDALREGMNLTCHEFIVSSFEKNAPLLLSEFTGSSSVLKEGAILINPWDINHVAQSIKRSLEMSPEEKRRRWKKLFKSVIEHDSDNWITKCFEYINNAWESNQETSTVFNLAPEKFCADYKASKKHLFIFKISEPPTSRMLSLLSELSSNNIVYVLSSFTKNTFESLYNGVLNIGLIAENGAYVRVNGSWYNIVEELDWMKEVAKIFDEKVERLPGSYYKIADSMIRFHTENADDQDRVPTVIGEAITHINTLFDDRDIHAYVHKDIVFVQQTGLALAAAEFLMKFYNSGVSPTDNSRISLSRTSSSMSVGNNKKHFQNQVDFVCVSGSTSPIIEPLFKLVKQEVEKNNLKFGYTILYGSSRSTYAKEHINGVNELFTILHDLTAA

SEQ ID NO: 2254 - protein, 758 aa, Olea europaea
MWKLKIADGTGPWLTTTNNHIGRQHWEFDPEAGTPDERVEVERLREEFKKNRFRTKQSADLLMRMQLVKENQRVQIPPAIKIKETEGITEEAVITTLRRAISFYSTIQAHDGHWPAESAGPLFFLPPLVLALYVTGAINVVLSREHQKEITRYIYNHQNEDGGWGIHIEGHSTMFGSVLSYITLRLLGEGQEDGEDKAVARGRKWILDHGGAVGIPSWGKFWLTVLGVYEWDGCNPMPPEFWLLPNFSPIHPGKMLCYCRLVYMPMSYLYGKRFVGPITGLVLSLRQEIYTEPYHGINWNRARNTCAKEDLYYPHPLAQDMLWGFLHHFAEPVLTRWPFSKLREKALKVAMEHVHYEDMNSRYLCIGCVEKVLCLIACWVEDPNSEAYKRHIARIPDYFWVAEDGLKMQSFGCQMWDAAFAIQAILSSNLAEEYGPTLMKAHNFVKASQVQENPSGDFNEMYRHTSKGAWTFSMQDHGWQVSDCTAEGLKAALLFSQMPIELVGAEIETGHLYDAVNVILTLQSASGGFPAWEPQKAYRWLEKLNPTEFFEDVLIERDYVECTSSAVQALKLFKQLHPGHRRKEIASCISKAIQYIEATQNPDGSWDGSWGICFTYGTWFAVEGLVACGKNYHNSPTLRRACEFLLSKQLPDGGWSESYLSSSNKVYTNLEGNRSNLVQTSWALLSLIKAGQVEIDPGPIHRGIKLLVNSQMEDGDFPQEEITGAFMKNCTLNYSSYRNIFPIWALGEYRRRILHAQT

SEQ ID NO: 2255 - protein, 758 aa, Taraxacum officinale
MWKLQLSKGDDDPEVRSVNHHMGRQYWEFDPHAGTPEEQSQIESMREEFTRNRLNVTHSSDLLMRFQLTSKNRGGIEKSHVKEEGGDDEVVVKTLKKALKFYSSLQGEDGSWPGDYGGPLFLLPGLIIGLHVMGMKDLVLSIEQQNEIRRYLYNHQNVDGGWGLHIEGNSTMLSTALNYVSLRLLGEELDDGKGAMTKAQSWILKHGSVTHIPSWGKLWLSVLGVYEWRGNNPLPPETWLLPYFLPLHPGRLWCHTRMVYLPMSYLYGKRFVGPISSIVLSLRRELYSTLYYQVNWDLARKQCAKDDLYYPHPLIQDLLWDSLNKIVEPLLMQWPVAKLRKEALKTVMQHIIMRMRTRTIFCIGPVNKVLNMLCCWVEDPKTPINKLHLSRIKDYLWVAEDGMKMQGYNGSQLWDVVFSVQAIVATNLVDEYSSMLHKAHDFIKNSQVKKNSSGNSQSWYRHISRGGWPFSTPDNGWPVSDCTAEALKTVLMLSQMPHDIVGEAIAPECLYDAVNVILSLQNSDGSFATYELTRSYSWLELVNPAETFGDIVIDYPYVECTSAVVQSLRSFTKLYPSHRRIQIETCIEKAIAFIERSQLGDGSWYGSWAICYTYGTWFGIKGLVAGGKTYETSHSIRKACAFLLSKQLHSGGWGESYTSCQQKTYTNLVGNKSHITNTSWALLALIEAGQPRRDRIPLHRAAKVLIDHQLGNGDFPQQEIIGVFNKNCMISYSSYRNIFPIWALGEYLNHVITKKSLG

SEQ ID NO: 2256 - protein, 428 aa, Deinococcus radiodurans
MWAFNVQFGTSKGDDMISGLKRVVITGLGPVTPIGVGAKAYAEAQRAGKNGIGPITRFDAKDTASKIAGEVHDSLDDFVDPREARKLDRYTLLALSAAELAVRDSGLSAEDLRGERTGTLVGSGIGGMKTFEDQARVYVERGAGRISPMFIPMQIANMATGHIAMRYGAMGPSSTVVTACATGTGAIGEAARYIQLGLADVMLAGGAEASITAMAVGGFSNMKALSTRNDDPEHASRPFSATRDGFVLSEGAGVVVLEEYEHAKARGATIYAEVAGFGVSADAYHITMPAPQGAGAQLAMKMALHTAGVNPEQVGYINAHGTSTHFNDLHETQAIQHVFGDHAAQLAVSSTKSMTGHLLGAAGAIEAIAVAQALADGLLPPTINLTDPDPELPLDFIPEGARERQVDYALSNSFAFGGQNAALLLGRV

SEQ ID NO: 2257 - protein, 403 aa, Deinococcus radiodurans
MTRATADRCSFCGRQHPQIAQLIEAPGRAAFICNECAERAFDLVKQQRKEAGSEFSLDELPSAKEIKAYLDEFVIGQDEAKKALAVAVVSHYHRLSNPDAGLQKSNILLIGPTGTGKTLLAQSLAEMLEVPFAIADATTLTEAGYVGDDVENVIVRLLQAAEYDVAAAERGIIYVDEIDKIARKSEGTSITRDVSGEGVQQALLKIIEGTVAQVPPQGGRKHPQQELVQVDTRNILFIVGGAFESMSEIARARTNVRAVGFGAEHKGEEKEEVRFLPEDLVKFGLIPEFVGRLPLVVQLQDLDEDALIRILTEPQGAIIKQYQALFGFQGVDLTFSEEALQEVAHRAKERKTGARGLRAVLEKSMTDLLFELPRDDVKEIRFEAEYIDDPLKALESKGLKKSA

SEQ ID NO: 2258 - protein, 130 aa, Cyanidium caldarium
MDKIDEIVEKIKLLSLLEASELVKRIEDTFQVNVSNIQPVTGLSSNLTTTQQTPESAEVKEKWDVILENVPADKKIAILKVVRSITGLGLKEAKEFVESVPKIIKQSISQADAEHIKQQIEDAGASVVLK

SEQ ID NO: 2259 - protein, 212 aa, Saccharum officinarum
HEGQPLESEPNEPLRVNVLFKHVQKMLTGDSAVIAETGDSWFNCQKLKLPEGCGYEFQMQYGSIGWSVGALLGYAQGANNKRVIACIGDGSFQVTAQDVSTMLRCEQNSIIFLINNGGYTIEVEIHDGPYNVIKNWNYTGLVDAIHNGEGKCWTSKVKCEEELTAAIETALGEKKDCLCFIEVIAHKDDTSKELLEWGSRVSAANSRPPNPQ

SEQ ID NO: 2260 - protein, 59 aa, Schizosaccharomyces pombe
LAIIIAFGQATAYVLTGMYGRPQDLGAGICLLLILQLAAASLIVLLLDELLQKGYGLGS

SEQ ID NO: 2261 - protein, 988 aa, Arabidopsis thaliana
MRLFLLLAFNALMLLETHGFTDETDRQALLQFKSQVSEDKRVVLSSWNHSFPLCNWKGVTCGRKNKRVTHLELGRLQLGGVISPSIGNLSFLVSLDLYENFFGGTIPQEVGQLSRLEYLDMGINYLRGPIPLGLYNCSRLLNLRLDSNRLGGSVPSELGSLTNLVQLNLYGNNMRGKLPTSLGNLTLLEQLALSHNNLEGEIPSDVAQLTQIWSLQLVANNFSGVFPPALYNLSSLKLLGIGYNHFSGRLRPDLGILLPNLLSFNMGGNYFTGSIPTTLSNISTLERLGMNENNLTGSIPTFGNVPNLKLLFLHTNSLGSDSSRDLEFLTSLTNCTQLETLGIGRNRLGGDLPISIANLSAKLVTLDLGGTLISGSIPYDIGNLINLQKLILDQNMLSGPLPTSLGKLLNLRYLSLFSNRLSGGIPAFIGNMTMLETLDLSNNGFEGIVPTSLGNCSHLLELWIGDNKLNGTIPLEIMKIQQLLRLDMSGNSLIGSLPQDIGALQNLGTLSLGDNKLSGKLPQTLGNCLTMESLFLEGNLFYGDIPDLKGLVGVKEVDLSNNDLSGSIPEYFASFSKLEYLNLSFNNLEGKVPVKGIFENATTVSIVGNNDLCGGIMGFQLKPCLSQAPSVVKKHSSRLKKVVIGVSVGITLLLLLFMASVTLIWLRKRKKNKETNNPTPSTLEVLHEKISYGDLRNATNGFSSSNMVGSGSFGTVYKALLLTEKKVVAVKVLNMQRRGAMKSFMAECESLKDIRHRNLVKLLTACSSIDFQGNEFRALIYEFMPNGSLDMWLHPEEVEEIHRPSRTLTLLERLNIAIDVASVLDYLHVHCHEPIAHCDLKPSNVLLDDDLTAHVSDFGLARLLLKFDEESFFNQLSSAGVRGTIGYAAPEMFTGKRPTNELFGGNFTLNSYTKSALPERILDIVDESILHIGLRVGFPVVECLTMVFEVGLRCCEESPMNRLATSIVVKELISIRERFFKASRTTWR

SEQ ID NO: 2262 - protein, 507 aa, Oryza sativa; identical to SEQ ID NO: 755

SEQ ID NO: 2263 - protein, 261 aa, Vicia faba
AHIITAVIGSGVLSLAWAIAQLGWIAGPSMMLLFSFVTYYTSTLLSACYRTGDQLNGKRNYTYTDAVRAYLGGFKVKICGLVQYVNLFGVAIGYTIAASISMMAIKRSNCFHSSGGKDPCHMNGNLYMISFGIVEIFFSQIPDFDQLWWLSTLAAVMSFTYSTIGLGLGVGKVIENKGIKGSLTGITVGTVTQTQKVGRSFQALGNIAFAYSYSMILIEIQDTIKSPPSESKTMKAATLISVVVTTIFYMLCGCLGYAAFG

SEQ ID NO: 2264 - protein, 476 aa, Phaseolus vulgaris
MGGGFRVLHLVRPFLSFLPEVQTADRKVPFREKVIYTVISLFIFLVCSQLPLYGIHSTTGADPFYWMRVILASNRGTVMELGITPIVTSGLVMQLLAGSKIIEVDNNVREDRALLNGAQKLLGILIAIGEAVAYVLSGMYGSVGQLGVGNAILIILQLCFAGIIVICLDELLQKGYGLGSGISLFIATNICENIIWKAFSPTTINSGRGAEFEGAVIALFHLLITRSDKVRALREAFYRQNLPNVTNLLATVLIFLIVIYFQGFRVVLPVRSKNARGQQGSYPIKLFYTSNMPIILQSALVSNLYFISQLLHRKYSGNFFVDLLGKWKESEYGGGQSAPVGGIAYYITAPSSLADMAANPFHALFYLVFMLSACALFSKTWIEVSGSSAKDVAKQLKEQQMVMPGHRESNLQKELNRYIPTAAAFGGICIGALTVLADFMGAIGSGTGILLAVTIIYQYFETFEKERASELGFFGF

SEQ ID NO: 2265 - protein, 699 aa, Adiantum capillus-veneris
MAKPCTIVWLRRDLRLEDNPALCAAGRIGNVVPVFIWSPEEERQFHPGRVSRWWLKQSLIQLDVSLRSFGVPLVMRKSTDTLGTLQELIKATGATQVFYNHLYDPISLVRDHHVKQGLTQSGIQVQSFNGDLLYEPWEVLNDDGKPFTSFESYWQKCLNMPFEPDSPLLPPRRLTSIAGSIPTYTPEELGLEDETEKSSNALLARAWAPGWSNADRALEAFLAGPLLEYSRNRHKIDGPTTSLLSPHMHFGEVSVRKVYHSVRRLQLLWAKDGSKLGEESIYFFMRSIGFREYSRYLSFNFPFTHERSLLSNLKSFPWRVDEGFFKAWRQGRTGYPLVDAGMRELWATGWLHNRVRVIVSSFCVKFLQLPWRWGMKYFWDTLLDADLESDVLGWQYISGSLPDGHELDRMDNPQTEGYKHDPVGEYVRRWLPELVRLPTEWIHHPWDAPPAVLRAAGVELGSNYPRPIVEVAAARERLRQAVAQMWEQEAALKAAGVATDAEALDENLEVKVVTPPLVSTHSLKTAVAGTLSRSSLRDQRVPTCGKQLSMENGVPHEGDNSPDIAMSPQQDNLLATTAPPEAHSTAEKCDNKSMNCDQTPEPKHNVPPPAVSDGNSTAESSSSPKQVNDELRNGVPLVWVPSIVNQQPVVEPSCVPYAGDAGQLRKHLLALQNSRTENKMEEKSPLSEWRRRTKRKAKA

SEQ ID NO: 2266 - protein, 487 aa, Adiantum capillus-veneris
MTTSTTIVWLRRDLRLDDNPALKEASKIGNAVVPVFVWVPEEEGQFQQGRMSRWWLKQSLKQLAQSLDSLGSPLIIRRSSSSLQALMDLVIHTQASQVFFNHLYDPISLVRDQRVKEGLLQTGIHVRTFNADLLYEPWQVNDPSGKAFTTFNEFWDKCLNMPEEPHAPLLPPTRSLLAFAGHLPGCTVEDLELENNSEKDSNALLARSWTPGWINAEKALEAFVERHLLQYAANQHMVDGSTTSFLSPHLHFGELSVRKVFYNVRIKAVQWTKEGKPDGEQSVNLFLRSIGLRDYSRYICFNFPFTHERLILQNRRPFPWRVDEGLFKAWRQGRTGYPLVDAGMRQIWATGWLHNRIRVIVSSFFVKVLQLPWTWGMKYFWDALLDADLENDILGWQYISGGLPDGHELERMDDLQIEGYKYDPRGEYVRKWLPELSRLPTEWIHHPWDAPPRALRAAGVELGSNYPRPLVEFAAAWSRLQTALREA

SEQ ID NO: 2267 - protein, 728 aa, Arabidopsis thaliana
MASTEALLPVTSLQDPLSESRSDQIPETRRRRPIKVHLAVYSGLLLIALYVTLIVTHDGSKAEIATESRPRMAGVSEKSNDGVWISSDDGKVEAFPWNNTILSWQRTAFHFQPEKNWMNGTNIKCPLFYKGWYHFFYQYNPNAAVWGDIVWGHAVSKDLIHWLYLPIAMVPDQWYDANGVWTGSATFLDDGSIVMLYTGSTDEFVQVQNLAYPEDPSDPLLLKWVKFSGNPVLVPPPGIGAKDFRDPTTAWKTSSGKWRITIGSKINRTGISLIYDTTDFKTYEKHETLLHQVPNTGMWECVDFYPVSKTQLNGLDTSVNGPDVKHVIKASMDDTRIDHYAIGTYDDSNATWVPDNPSIDVGISTGLRYDYGKYYASKTFYDQNKGRRILWGWIGESDSEAADVQKGWSSVQGIPRTVVLDTRTHKNLVQWPVEEIKSLRLSSKKFDMTIGPGTVVPVDVGSATQLDIEAEFEIKTDDLKLFFDDDSVEADNKFSCETNGGSTARGALGPFGFSVLADEGLSEQTPVYFYVTKGKHSKLNTVFCTDTSRSTLANDVVKPIYGSFVPVLKGEKLTMRILVDHSIVEGFAQGGRSCITSRVYPTKAIYGATKLFLFNNAIDATVTASFTVWQMNNAFIHPYSSDDLGQILSLTYLRTQSRASSNAAFYFISYKTTKTVVTMTQYELKSLAVHKTITKQKSLSFVKKKEGEKQKQSHPRARKISIRNLKSA

SEQ ID NO: 2268 - protein, 847 aa, Arabidopsis thaliana
MELDDLDLSGSWPLDQITFASNFKSPVIFSSSEQPFSPLWSFSETSGDVGGELYSAAVAPTRFTDYSVLLASSESETTTKENNQVPSPSWGIMPLENPDSYCAIKAKMTQALRYFKESTGQQHVLAQVWAPVKNRGRYVLTTSGQPFVLGPNSNGLNQYRMVSLTYMFSLDGERDGELGLPGRVFRKKLPEWTPNVQYYSSKEFSRLGHALHYNVQGTLALPVFEPSRQLCVGVVELIMTSPKINYAPEVEKVCKALEAVNLKTSEILNHETTQVICESNICNEGRQNALAEILEILTVVCETYKLPLAQTWVPCRHRSVLAFGGGFKKSCSSFDGSCMGKVCMSTSDLAVYVVDAHVWGFRDACAEHHLQKGQGVAGRAFQSGNLCFCRDVTRFCKTDYPLVHYARMFKLTSCFAVCLKSTYTGDDEYVLEFFLPPAITDKSEQDCLLGSLLQTMKQHYSSLKVVSETELCENNMSLEVVEASEDGMVYSKLEPIRIHHPAQISKDYLELNAPEQKVSLNSDFMENNEVDDGVERFQTLDPIPEAKTVKKSERKRGKTEKTISLEVLQQYFAGSLKDAAKSLGVCPTTMKRICRQHGISRWPSRKINKVNRSLTRLKHVIDSVQGADGSLNLTSLSPRPWPHQIPPIDIQLAKNCPPTSTSPLSNLQDVKIENRDAEDSAGSSTSRASCKVNPICETRFRLPTHNQEPSRQVALDDSDSSSKNMTNFWAHLTCQDTASPTILQHKLVSIKATYREDIIRFKISPESVSITELKQQVAKRLKLETAAFELKYLDDDREWVSVSCDADLSECLDTSAAKANTLRLSVHDVTFNFGSSCESSEETMMCL

SEQ ID NO: 2269 - protein, 861 aa, Nicotiana tabacum
MMMVGKLFSLLHFFTLFCLFTVTFASTKEATALLKWKATLQNQSNSLLVSWTPSSKACKSWYGVVCFNGRVSKLDIPYAGVIGTLNNFPFSSLPFLEYIDLSMNQLFGSIPPEIGKLTNLVYLDLSFNQISGTIPPQIGSLAKLQTLHILDNHLNGSIPGEIGHLRSLTELDLSINTLNGSIPPSLGNLHNLSLLCLYKNNISGFIPEEIGYLSSLIQLDLNTNFLNGSIPASLENLHNLSLLYLYENQLSGSIPDEIGQLRTLTDIRLNTNFLTGSIPASLGNLTSLSILQLEHNQLSGSIPEEIGYLRTLAVLSLYTNFLNGSIPISLGNLTSLSSLSLYENHLSGPIPSSLGNLDNLVYLYLYANQLSGPIPSELGNLKNLNYMKLHDNQLNGSIPASFGNLRNMQYLFLESNNLTGEIPLSICNLMSLKVLSLGRNSLKGDILQCLINISRLQVLKIPDNNLSEEIPSSICNLTSLRILDLSRNNLKGSIPQCFGDMGGHLEVLDIHKNGISGTLPTTFRIGSVLRSFTLHENELEGKIPRSLANCKELQVLDLGDNLLNDTFPMWLGTLPKLQVLRLKSNKLYGSIRTSKDENMFLELRIINLSYNAFTGNIPTSLFQQLKAMRKIDQTVKEPTYLGKFGADIREYNYSVTVTTKGLELKLVRILTVYIIIDLSSNRFEGHVPSIMGELIALRVLNLSRNGLQGHIPPSLGNLFVIESLDLSFNQLSGEIPQQIASQLTSLAVLNLSYNHLQGCIPQGPQFHTFENNSYEGNDGLRGFPISKGCGNDRVSETNNTVSTLDDQESTSEFLNDFWKAALMGYGSGLCIGLSILYFMISTGKLKWLSRITEWLQNRFII

SEQ ID NO: 2270 - protein, 438 aa, Pyrococcus horikoshii
MLRTHYSNEITEELNGKRVKVAGWVQEVKDLGGIKFIWIRDREGIVQVTAPKKKVSQEIFKLIPKLNSEDVIVVEGIVNFTPKAKLGFEVIPEKLEVISRAKTPLPLDPTGKVKAELDTRLDNRFMDLRNPKVMAIFKIRSSVFRAVREFFYSEGFIEIHTPKIIATATEGGTELFPLKYFERDAFLAQSPQLYKQMMMATGLDKVFEIAPIFRAEEHNTTRHLNEAWSIDAEMAFIENEGEVMDLLERLISYVINYVREHNEKELKTLEFELNEPKRPFPRITYDKALEILSDLGKEIPWGEDIDTEGEKLLGKYMAENEGADLYFIYRYPSEAKPFYIMKYDEKPEVCRAFDLEYRGVEISSGGQREHRHDVLLEQIKEKGLNPKSFEFYLKAFEYGMPPHGGFGLGAERLIMRMLDIGNIREVILFPRDRRRLVP

SEQ ID NO: 2271 - protein, 455 aa, Arabidopsis thaliana
MDHLVETNSVPSRLVEERLDEIRRVMGKADDDPLRIVGVGAGAWGSVFIAMLQENYGKFRGKVSVRIWRRGGRAIDKATAEHLFEVINSREELLRRLIRRCAYLKYVEARLGDRVLYADEILKDGFCLNMIETPLCPLKVVTNLQEAVWDADIVINGLPSTETFQVFNEISKYWKERVNAPVIISLAKGVEAEFEPHPRIVTPTQMIHRATGIPLENILYLGGPNIASEVYNKEYANARICGSEKWRKPLGKFLRQSHFIVWDNSDLITHEVMGGLKNVYAIGAGMVATLTKESATSKSVYFAHCTSEMIFITHLLAKEPEKLAGPLLADTYVTLLKGRNAWYGQKLAKGELSLEMGDSIKGKGMIQGVSAVKAFFELLNQSSLSLQHPEEGKPVTPAELCPILKMLYRILITREFSCEAILEALRDETMNDPRELIEIAHSHLFFQPWLLGQKP

SEQ ID NO: 2272 - protein, 269 aa, Pimpinella brachycarpa
MGRQPCCDKLGVKKGPWTADEDNKLINFILTNGQCCWRAVPKLAGLRRCGKSCRLRWTNYLRPDLKRGLLTDAEEQLVIDLHARLGNRWSKIAGRLPGRTDNEIKNHWNTHIKKKLIKMGIDPVTHEPLHKEETNSQKEILLQPFQSPAETENHVPPIPHTNDMASSENSCTPTDQNSSGDESNSLSAICDQIDDSLISYLFEDDTPGLVDAPWENFNKVDMVLPSWDESFPWLLDCQDFGIQDFGFDCFNDIEMNMLTQLDVKNDQTG

SEQ ID NO: 2273 - protein, 1088 aa, Arabidopsis thaliana
MDEDSSMVADNDQDREFQSLDGGQSPSPMERETPQQMNDQSPPPEGGSVPTPPPSDPNPATSQQQAAAVVGQEQQPALVVGPRCAPTYSVVDAMMDKKEDGPGPRCGHTLTAVPAVGDEGTPGYIGPRLVLFGGATALEGNSGGTGTPTSAGSAGILLKASHLLNLTGNLRWQWLAGATADVHCYDVLSNKWTRLTPFGEPPTPRAAHVATAVGTMVVIQGGIGPAGLSAEDLHVLDLTQQRPRWHRVVVQGPGPGPRYGHVMALVGQRYLMAIGGNDEGEGPPPCMYATASARSDGLLLLCGGRDANSVPLASAYGLAKHRDGRWEWAIAPGVSPSSRYQHAAVFVNARLHVSGGALGGGRMVEDSSSVAVLDTAAGVWCDTKSVVTSPRTGRYSADAAGGDASVELTRRCRHAAAAVGDLIFIYGGLRGGVLLDDLLVAEDLAAAETTYAASHAAAAAATNSPPGRLPGRYGFSDERNRELSESAADGAVVLGSPVAPPVNGDMHTDISPENALLPGTRDEFSDNDPSPLCRRTNKGVEYLVEASAAEAEAISATLAAAKARQVNGEVELPDRDCGAEATPSGKPTFSLIKPDSMGSMSVTPAGIRLHHRAVSVTLIVLNISSLALYCFEHHVVVAAETGGALGGMVRQLSIDQFENEGRRVSYGTPESATAARKLLDRQMSINSVPKKVIAHLLKPRGWKPPVRRQFFLDCNEIADLCDSAERIFASEPTVLQLKAPIKIFGDLHGQFGDLMRLFDEYGSPSTAGDISYIDYLFLGDYVDRGQHSLETISLLLALKVVLSVLCQFCLDAGVLVAFDHRRFDVLFLVLQVEYQHNVHLIRGNHEAADINALFGFRIECIERMGERDGIWVWHRINRLFNWLPLAASIEKKIICMHGGIGRSINHVEQIENIQRPITMEAGSIVLMDLLWLVLSFYMSDPTENDSVEGLRPNARGPGLVTFGVSNFLPDRVMEFCNNNDLQLIVRAHECVMDGFERFAQGHLITLFSATNYCGTANNAGAILVLGRDLVVVPKLIHPLPPALSSPETSPERHIEDTWMQELNANRPATPTRGRPQNSNDRGGSLAWM

SEQ ID NO: 2274 - protein, 298 aa, Saccharomyces cerevisiae
MSGELANYKRLEKVGEGTYGVVYKALDLRPGQGQRVVALKKIRLESEDEGVPSTAIREISLLKELKDDNIVRLYDIVHSDAHKLYLVFEFLDLDLKRYMEGIPKDQPLGADIVKKFMMQLCKGIAYCHSHRILHRDLKPQNLLINKDGNLKLGDFGLARAFGVPLRAYTHEIVTLWYRAPEVLLGGKQYSTGVDTWSIGCIFAEMCNRKPIFSGDSEIDQIFKIFRVLGTPNEAIWPDIVYLPDFKPSFPQWRRKDLSQVVPSLDPRGIDLLDKLLAYDPINRISARRAAIHPYFQES

SEQ ID NO: 2275 - protein, 297 aa, Schizosaccharomyces pombe
MENYQKVEKIGEGTYGVVYKARHKLSGRIVAMKKIRLEDESEGVPSTAIREISLLKEVNDENNRSNCVRLLDILHAESKLYLVFEFLDMDLKKYMDRISETGATSLDPRLVQKFTYQLVNGVNFCHSRRIIHRDLKPQNLLIDKEGNLKLADFGLARSFGVPLRNYTHEIVTLWYRAPEVLLGSRHYSTGVDIWSVGCIFAEMIRRSPLFPGDSEIDEIFKIFQVLGTPNEEVWPGVTLLQDYKSTFPRWKRMDLHKVVPNGEEDAIELLSAMLVYDPAHRISAKRALQQNYLRDFH

SEQ ID NO: 2276 - protein, 1026 aa, Pisum sativum
MSLPAETDMEDTKPSVVMVDNGDQAQFRFAEFSKNELALDEKSCKEAMDLFGETKHLLVANVLSMGNGTTEEAERNWFAFILYSIKKLAQKNEEIQKDEIENTGLTLCRILRAAKLNIAEFFKELPQFVVKAGPILSNLYGPDWENKLEAKEMHANTIHLKILSKYYKRVFEEFFVSTDANVENNSSVTNRVSEYHRFGWLLFLALRVHAFSRFKDLVTCTNGLISILAILIIHVPARFRSFNIHDSSRFVKKSANGVDLLASLCNLYNTSEDELRKTIEQANNLVADILKKKPCLASECETENLENFDRDGLTYFKDLMEESSLPSSLSVLENDYDHMTRNNGELDERLFINEDDSLLASGSLSRGSVSAGGVKRKIDLMTSPTKMITSPLSPHRSPASHANGIPSSATPMIAATPVSTAMTTAKWLRTVISPLPSKPSQELERFLTSCDKDITSDVIRRAQIILQAIFPSSPLGDRCVTGSLQSANLMDNIWAEQRRLEALKLYYRVLATMCRAEAQILGNNLTSLLTNERFHRCMLACSAELVLATHKTVTMLFPAVLERTGITAFDLSKVIESFIRYEESLPRELRRHLNSLEERLLESLVWEKGSSMYNSLAVARPALSVEINRLGLLAEPMRSLDEIAMDINFSCGGLPPVPSLPKPEPMSAQNGDPRSPKRPCTEHRNVLAERNSFTSPVKDRLLHLSNLKSKLLPPPLQSAFASPTKPNPGGGGETCAETGISVFFSKIVKLGAVRISGMVERLQLSQQIRENVYCLFQRILNQWTSLFFNRHIDQIILCCFYGVAKISQLNLTFREIIYNYRKQPQCKPEVFRSVFVDWSSARRNGSCKQRTGQEHIDIISFYNEVFIPSVKPLLVEIGPGGATTRNDRIPEANNKNDGHLAQCPGSPRISPFPSLPDMSPKKVSATHNVYVSPLRSSKMDALISHSSKSYYACVGESTHAYQSPSKDLTAINNRLNGNRKVRGPLNFDDVDVGLVSDSMVANSLYLQNGSSASSSGAPLKSEQPDS

SEQ ID NO: 2277 - protein, 174 aa, Hordeum vulgare
MASSGPLLPTLLVLLAAAAATASAAGARPASTTTATTFVRAADLADRLEGAVSQQCWETLLHIKSCTGEIILFFLNGEAYLGPGCCRAIRAIEQRCWAADLMLSVIGFTPEEGDMLKGYCDAGDDDNNNGPRHSFGGSSPAPPPRRALGADGVATGAGTVAAAAGRKGLGAPVG

SEQ ID NO: 2278 - protein, 331 aa, Candida albicans
MSGPVNSVSKQMNVDTDIITLTRFILQEQQTVAPTATGELSLLLNALQFAFKFIAHNIRRAELVNLIGVSGSANSTGDVQKKLDVIGDEIFINAMRSSNNVKVLVSEEQEDLIVFPGGGTYAVCTDPIDGSSNIDAGVSVGTIFGVYKLQEGSTGGISDVLRPGKEMVAAGYTMYGASAHLALTTGHGVNLFTLDTQLGEFILTHPNLKLPDTKNIYSLNEGYSNKFPEYVQDYLKDIKKEGYSLRYIGSMVADVHRTLLYGGIFAYPTLKLRVLYECFPMALLMEQAGGSAVTIKGERILDILPKGIHDKSSIVLGSKGEVEKYLKHVPK

SEQ ID NO: 2279 - protein, 470 aa, Moritella marina
MKKTKIVCTIGPKTESVEKLTELVNAGMNVMRLNFSHGNFAEHSVRIQNIRQVSENLNKKIAVLLDTKGPEIRTIKLENGDDVMLTAGQSFTFTTDINVVGNKDCVAVTYAGFAKDLNPGAIILVDDGLIEMEVVATTDTEVKCTVLNTGALGENKGVNLPNISVGLPALSEKDKADLAFGCEQEVDFVAASFIRKADDVREIREILFNNGGENIQIISKIENQEGVDNFDEILAESDGIMVARGDLGVEIPVEEVIMAQKMMIKKCNKAGKVVITATQMLDSMISNPRPTRAEAGDVANAVLDGTDAVMLSGETAKGKYPVEAVSIMANICERTDNSMSSDLGANIVAKSMRITEAVCKGAVETTEKLCAPLIVVATRGGKSAKSVRKYFPKANILAITTNEKAAQQLCLTKGVSSCIVEQIDSTDEFYRKGKELALATGLAKEGDIVVMVSGALVPSGTTNTASVHQL

SEQ ID NO: 2280 - protein, 500 aa, Streptococcus thermophilus
MNKRVKIVATLGPAVEIRGGKKFGEDGYWSEKLDPDASAKNIAQLIEEGANVFRFNFSHGNHAEQGERMDVVRMAESIAGQKVGFLLDTKGPEIRTELFEGDAKEYAYKTGEQIRIATKQGLKSTRDVIALNVAGALDIFDDVEVGKQVLVDDGKLGLRVVDKDAEKREFIVEVENDGIIAKQKGVNIPYTKIPFPALAERDNADIRFGLEQGINFIAISFVRTAKDVQEVRAICEETGNGHVKLLAKIENQQGIDNIDEIIEAADGIMIARGDMGIEVPFEMVPVYQKMIITKVNAAGKIVVTATNMLETMTEKPRATRSEVSDVFNAVIDGTDATMLSGESANGPYPVESVRTMATIHKNAQTLLKEYGRLNSSTFDRSSNTEVVASAVKDATNSMHIQLIVALTESGNTASLIDTYRPEADIWAITFDELTQKSLMLNWGVIPVVTETPSSTDDMFEVAERVALESGLVESGDNIVIVAGVPVGSGNTNTMRIRTVK

SEQ ID NO: 2281 - protein, 358 aa, Spinacia oleracea
AAVGEAATQTKARTRSKYEIETLTGWLLKQPMAGVIDAELTIVLSSISLACKQIASLVQRAGISNLTGIQGAVNIQGEDQKKLDVVSNEVFSSCLRSSGRTGIIASEEEDVPVAVEESYSGNYIVVFDPLDGSSNIDAAVSTGSIFGIYSPNDECIVDSDHDDESQLSAEEQRCVVNVCQPGDNLLAAGYCMYSSSVIFVLTIGKGVYAFTLDPMYGEFVLTSEKIQIPKAGKIYSFNEGNYKMWPDKLKKYMDDLKEPGESQKPYSSRYIGSLVGDFHRTLLYGGIYGYPRDAKSKNGKLRLLYECAPMSFIVEQAGGKGSDGHQRILDIQPTEIHQRVPLYIGSVEEVEKLEKYLA

SEQ ID NO: 2282 - protein, 348 aa, Saccharomyces cerevisiae
MPTLVNGPRRDSTEGFDTDIITLPRFIIEHQKQFKNATGDFTLVLNALQFAFKFVSHTIRRAELVNLVGLAGASNFTGDQQKKLDVLGDEIFINAMRASGIIKVLVSEEQEDLIVFPTNTGSYAVCCDPIDGSSNLDAGVSVGTIASIFRLLPDSSGTINDVLRCGKEMVAACYAMYGSSTHLVLTLGDGVDGFTLDTNLGEFILTHPNLRIPPQKAIYSINEGNTLYWNETIRTFIEKVKQPQADNNNKPFSARYVGSMVADVHRTFLYGGLFAYPCDKKSPNGKLRLLYEAFPMAFLMEQAGGKAVNDRGERILDLVPSHIHDKSSIWLGSSGEIDKFLDHIGKSQ

SEQ ID NO: 2283 - protein, 364 aa, Xanthobacter flavus
MLEPNADHRAAVAQAAGVAASRITLTVMLDEWAGADARRRAVADTVCALATGCASLAAAIAEGPLAGDLARTLSSGEAGEGQKALDVISNDIVIGALKAAPVAAVASEENDAPVLLDPTAPLLVAIDPLDGSSNIDTDISVGTIFAVFPRPEGADASEPSAFLQNGRDMLAAGYVIYGPHTAMMLTLGAGTWHFALDRAGLFRLVDAEVKVKEGAAEFAINMSNYHHWDVPVRDYVDDCLAGKKGPRERDFNMRWVASMVADAHRIFQRGGIYLYPGDGRKGYTHGRLRLLYEAFPVAFLMEQASGSATDGRGAILDLSATGLHQRVPFIFGSRDEVARVSRYHLEPNGHGERSPLFARRGLFI

SEQ ID NO: 2284 - protein, 333 aa, Rhodobacter sphaeroides
MKPFPTHPDAIPAELQDVMDRLGSVAIEVANRIARGGIDEDLAGLCGTNTDGDGQKALDVIADDAFRVALEGSAVRFYASEEQDTAVTLNEAGTLALAIDPLDGSSNIDTNLSVGTTFAIWPAAPRPNPSFLRLGSELIAAGYVIYGPQVCMMVSFGKGTQKYVLDPGSRSFVLVDRAVKVPPSSTEFAINASNYRHWPKPIRAYIDDCVAGTEGPRGRNFNMRWLASLVAETHRILARGGVFLYPRDSRKGYEQGRLRYLYECAPIAFVITQAGGGATDGENPILGQTPSRLHARTPFVFGSAEKVARITAYHDLPEQETSALFGNRGLFRS

SEQ ID NO: 2285 - protein, 470 aa, Selenomonas ruminantium
MLKKTKIVCTQGPSTEKPGVIDALIANGMNCARFNFSHGDHEEHLGRINMVREAAKKAGKVISLILDTKGPEMRLGEFKDGKVMLEKGNKFTLTYDDEPGDETHVSVNHKGLYTEVKPGDTLLLSDGLVALKVDEIKGKDIVTTIQNSGKMSTRKRVAAPGVPLGLPPISEQDAKDIIFGCEQDMDFVAASFIQRPDDVIAIRKLIEEHNGHMEILPKIENLEGVKNFDAILEVSDGIMVARGDLGVEVPAEDVPLIQKEIIRKCNAAGKPVIVATQMLDSMERNPRPTRAEVSDVGNAILDGTDAIMLSGETASGDYPVEAVATMNRIAQRMESSLEYKELYVERGLQHMESRTRAIAHATVQMAYELDAPAIITPTESGYTTKVVSKYRPKAAIVAYTPSEKVLRQLNLRWGVYPVLGTQWSDVDEMISNATAAAVKEDLVQRGDLTIITSGVKMESRTRAIAHATDI

SEQ ID NO: 2286 - protein, 500 aa, Hordeum vulgare
MKGNYVQVYVMLPLDAVSVNNRFEKGDELRAQLRKLVEAGVDGVMVDVWWGLVEGKGPKAYDWSAYKQLFELVQKAGLKLQAIMSFHQCGGNVGDAVNIPIPQWVRDVGTRDPDIFYTDGHGTRNIEYLTLGVDNQPLFHGRSAVQMYADYMTSFRENMKDFLDAGVIVDIEVGLGPAGELRYPSYPQSHGWSFPGIGEFICYDKYLQADFKAAAAAVGHPEWEFPNDAGQYNDTPERTQFFRDNGTYLSEKGRFFLAWYSNNLIKHGDRILDEANKVFLGYKVQLAIKIAGVHWWYKVPSHAAELTAGYYNLHDRDGYRTIARMLKRHRASINFTCAEMRDSEQPPDAMSAPEELVQQVLSAGWREGLNVSCENALPRYDPTAYNTILRNARPHGINQSGPPEHKLFGFTYLRLSNQLVEGQNYVNFKTFVDRMHANLPRDPYVDPMAPLPRSGPEISIEMILQAAQPKIQPFPFQEHTDLPVGPTGGMGGQAEGPTCG

SEQ ID NO: 2287 - protein, 357 aa, Pisum sativum
MAVKEATSETKKRSGYEIITLTSWLLQQEQKGIIDAELTIVLSSISMACKQIASLVQRANISNLTGTQGAVNIQGEDQKKLDVISNEVFSNCLRSSGRTGIIASEEEDVPVAVEESYSGNYIVVFDPLDGSSNLDAAVSTGSIFGIYSPNDESLPDFGDDSDDNTLGTEEQRCIVNVCQPGSNLLAAGYCMYSSSVIFVLTIGKGVFVFTLDPLYGEFVLTQENLQIPKSGKIYSFNEGNYKLWDENLKKYIDDLKEPGPSGKPYSARYIGSLVGDFHRTLLYGGIYGYPRDKKSKNGKLRLLYECAPMSFIVEQAGGKGSDGHQRVLDIQPTEIHQRVPLYIGSTEEVEKVEKYLA

SEQ ID NO: 2288 - protein, 357 aa, Pisum sativum
MAVKEATSETKKRSGYEIITLTSWLLQQEQKGIIDAELTIVLSSISMACKQIASLVQRANISNLTGTQGAVNIQGEDQKKLDVISNEVFSNCLRSSGRTGIIASEEEDVPVAVEESYSGNYIVVFDPLDGSSNLDAAVSTGSIFGIYSPNDECLPDFGDDSDDNTLGTEEQRCIVNVCQPGSNLLAAGYCMYSSSVIFVLTIGKGVFVFTLDPLYGEFVLTQENLQIPKSGKIYSFNEGNYKLWDENLKKYIDDLKEPGPSGKPYSARYIGSLVGDFHRTLLYGGIYGYPRDKKSKNGKLRLLYECAPMSFIVEQAGGKGSDGHQRVLDIQPTEIHQRVPLYIGSTEEVEKVEKYLA

SEQ ID NO: 2289 - protein, 682 aa, Arabidopsis thaliana
MATAALLRSIRRREVVSSPFSAYRCLSSSGKASLNSSYLGQNFRSFSRAFSSKPAGNDVIGIDLGTTNSCVAVMEGKNPKVIENAEGARTTPSVVAFNTKGELLVGTPAKRQAVTNPTNTVSGTKRLIGRKFDDPQTQKEMKMVPYKIVRAPNGDAWVEANGQQYSPSQIGAFILTKMKETAEAYLGKSVTKAVVTVPAYFNDAQRQATKDAGRIAGLDVERIINEPTAAALSYGMTNKEGLIAVFDLGGGTFDVSVLEISNGVFEVKATNGDTFLGGEDFDNALLDFLVNEFKTTEGIDLAKDRLALQRLREAAEKAKIELSSTSQTEINLPFITADASGAKHFNITLTRSRFETLVNHLIERTRDPCKNCLKDAGISAKEVDEVLLVGGMTRVPKVQSIVAEIFGKSPSKGVNPDEAVAMGAALQGGILRGDVKELLLLDVTPLSLGIETLGGVFTRLITRNTTIPTKKSQVFSTAADNQTQVGIRVLQGEREMATDNKLLGEFDLVGIPPSPRGVPQIEVTFDIDANGIVTVSAKDKTTGKVQQITIRSSGGLSEDDIQKMVREAELHAQKDKERKELIDTKNTADTTIYSIEKSLGEYREKIPSEIAKEIEDAVADLRSASSGDDLNEIKAKIEAANKAVSKIGEHMSGGSGGGSAPGGGSEGGSDQAPEAEYEEVKK

SEQ ID NO: 2290 - protein, 637 aa, Vibrio proteolyticus
MGKIIGIDLGTTNSCVAVLDGDKPRVIENAEGERTTASVIAYTDGETLVGQPAKRQAVTNPTNTLFAIKRLIGRRFEDEEVQRDIEIMPYKIVKADNGDAWVEAKGQKMAAPQVSAEVLKKMKKTAEDFLGEEVTGAVITVPAYFNDAQRQATKDAGRIAGLEVKRIINEPTAAALAYGLDKKGGDRTIAVYDLGGGTFDISIIEIDEVEGEKTFEVLATNGDTHLGGEDFDNRLINYLVDEFKKEQGIDLKTDPLAMQRVKEAAEKAKIELSFTSQTDVNLPYVTADATAPKHMNVKVTRAKLESLVEDLVQRSLEPLKVALADADLSVNDITDVILVGGQTRMPMVQAKVAEFFGKEARRDVNPDEAVAMGAAVQGGVLAGDVKDVLLLDVTPLSLGIETMGGVMTKLVEKNTTIPTKANQVFSTAEDNQSAVTIHVLQGERKQAMYNKSLGQFNLEGIQPAPRGMPQIEVTFDLDADGILHVSAKDKQTGKEQKITIQASGGLSDDEIEKMVQEAEANKEADKKFEELATARNQADQMIHGTRKQVEEAGDALPAEDKEKIEAAVSELEDARKGDDKEAIDAKVQALMTASQKLMEIAQQQAQAQAAQGGDEAAQSKDDDVVDAEFEEVKDDKK

SEQ ID NO: 2291 - protein, 73 aa, Staphylococcus aureus
AAEKTEFDVELTSAGSSKIKVVKAVKEATGLGLKDAKELVDGAPKVIKEALPKEEAEKLKEQLEEVGATVELK

SEQ ID NO: 2292 - protein, 318 aa, Oryza sativa; identical to SEQ ID NO: 732

SEQ ID NO: 2293 - protein, 559 aa, Zymomonas mobilis
MSYTVGTYLAALVQIGLKHHFAVAGDYNLVLLDNLLLNKNMEQVYCCNELNCGFSAEGYARAKADAAAVVTYSVGALSAFDAIGGAYAENLPVILISGAPNNNDHAAGHVLHHALGKTDYHYQLEMAKNITAAAEAIYTPEEAPAKIDHVIKTALREKKPVYLEIACNIASMPCAAPGPASALFNDEASDEASLNAAVEETLKFIANRDKVAVLVGSKLRAAGAEEAAVKFADALGGAVATMAAAKSFFQKKTALHRYLMGEVSYPGVEKTMKEADAVIALAPVFNDYSTTGWTDIPDPKKLVLAEPRSVVVNGVRFPSVHLKDYLTRLAQKVSKKTGALDFFKSLNAGELKKAAPADPSAPLVNAEIARQVEALLTPNTTVIAETGDSWFNAQRMKLPNGARVEYEMQWGHIGWSVPAAFGYAVGAPERRNILMVGDGSFQLTAQEVAQMVRLKLPVIIFLINNYGYTIEVMIHDGPYNNIKNWDYAGLMEVFNGNGGYDSGAGKGLKAKTGGELAEAIKVALANTDGPTLIECFIGREDCTEELVKWGKRVAARQQP

SEQ ID NO: 2294 - protein, 295 aa, Adonis palaestina
MSSIRINPLYSIFSTTTKTLSASCSSPAVHLQQRCRTLSISSSITNSPRRGLNRLFASTSTMGEVADAGMDAVQKRLMFDDECILVDENDKVVGHDSKYNCHLMEKIEAENLLHRAFSVFLFNSKYELLLQQRSATKVTFPLVWTNTCCSHPLFRDSELIEENFLGVRNAAQRKLLDELGIPAEDVPVDEFTPLGRILYKAPSDGKWGEHELDYLLFIVRDVKYDPNPDEVADAKYVNREELKEILRKADAGEEGIKLSPWFRLVVDNFLFKWWDHVEEGKIKDVADMKTIHKLT

SEQ ID NO: 2295 - protein, 267 aa, Adonis palaestina
IHLQQRCRTLSISSSITNSSRRRLNRLFASTSTMGEVTDAGMDAVQKRLMFDDECILVDENDKVVGHDSKYNCHLMEKIEAENLLHRAFSVFLFNSKYELLLQQRSATKVTFPLVWTNTCCSHPLFRDSELIEENYLGVRNAAQRKLLDELGIPAEDVPVDEFTPLGRILYKAPSDGKWGEHELDYLLFIVRDVKYDPNPDEVADAKYVNREELREILRKADAGEEGLKLSPWFRLVVDNFLFKWWDHVEQGTIKEVADMKTIHKLT

SEQ ID NO: 2296 - protein, 280 aa, Lactuca sativa
MLKFPPFKTIATMISSPYSSFLLPRKSSFPPMPSLAAASVFLHPLSSAAMGDSSMDAVQRRLMFDDECILVDENDKVVGHDTKYNCHLMEKIEKGNMLHRAFSVFLFNSKYELLLQQRSATKVTFPLVWTNTCCSHPLYRESELIDENALGVRNAAQRKLLDELGIPGADVPVDEFTPLGRILYKAASDGKWGEHELDYLLFMVRDVGLDPNPDEVKDVKYVNREELKELVRKADAGEEGVKLSPWFKLIVDNFLFQWWDRLHKGTLTEAIDMKTIHKLT

SEQ ID NO: 2297 - protein, 263 aa, Lactuca sativa
FASKSLPLTAQISTFAGLNLRRRTFTTITAAMGDDSGMDAVQRRLMFDDECILVDENDNVLGHDTKYNCHLMEKIEKDNLLHRAFSVFLFNSKYELLLQQRSETKVTFPLVWTNTCCSHPLYRESELIPENALGVRNAAQRKLLDELGIPAEDVPVDEFTTLGRMLYKAPSDGKWGEHEVDYLLFLVRDVAVNPNPDEVADIRYVNQEELKELLRKADAGEEGLKLSPWFRLVVDNFLFKWWDHVQKGTLNEAIDMKTIHKLI

SEQ ID NO: 2298 - protein, 245 aa, Tagetes erecta
KNNSNLLRRSYSAMGDDSGMDAVQRRLMFDDECILVDECDNVVGHDTKYNCHLMEKIETGKMLHRAFSVFLFNSKYELLLQQRSATKVTFPLVWTNTCCSHPLYRESELVPENALGVRNAAQRKLLDELGIPAEDVPVDQFTPLGRMLYKAPSDGKWGEHELDYLLFIVRDVAVNPNPDEVADIKYVNQEELKELLRKADAGEEGLKLSPWFRLVVDNFLFKWWDHVQKGTLTEAIDMKTIHKLI

SEQ ID NO: 2299 - protein, 470 aa, Arabidopsis thaliana
MKRSFLLLYVLLVQAFYGAWCSVGESLHCEYSNLASLHRPHSVSITEFGAVGDGVTLNTKAFQNALFYLNSFSDKGGAKLFVPAGQWLTGSFDLISHLTLWLDKGATILGSTAKNWPVVDPLPSYGRGRELPGRRHRSLIYGQNLTDVVITGENGTIDGQGTVWWDWFRNGELNYTRPHLVELMNSTGLIISNLTFLNSPFWNIHPVYCRDVVVKNLTILAPLESPNTDGVDPDSSTNVCIEDCYIVTGDDLVSIKSGWDEYGISYARPSSKIKINRLTGQTTSSSGIAIGSEMSGGVSEIYIKDLHLFNSNTGIRIKTSAGRGGYVRNVHILNVKLDNVKKAIRFTGKYGEHPDEKYDPKALPAIEKITFENVNGDGIGVAGLLEGIEGDVFKNICFLNVTLRVKKNSKKSPWECSNVRGYSQWVSPEITCDSLKESIFPEHGSDCFGLSENNMEISSGLSRSPWLLSW

SEQ ID NO: 2300 - protein, 442 aa, Aeropyrum pernix
MLKDRFIADIIASKESLVGGRVRVCGWAYRIRDLGRLKFILVRDRSGVIQATVKRGESPEDALRAAEDLKLESVVCVEGELRQAPTREGVEVKVERLEVLSTPVEPLPLEVEGSEKASLPTRLKYRWLDIRNPMVSAIFELEAMVAKVFRDYYWSQGFVEIFTPKIVAAGTESGAEVFPVVYFDKTAFLAQSPQFYKQFAVIAGLERVFEIGPVFRAEPHHTSRHLNEYHSLDIEVGFIESYNDVMNYVEGFMRAIVRMLEEDGRRVLELYGVELPRIPASGIPKIPLRKAYEILEEKYGKKVEYGEDLDSEGERLMGAYAGEELDSDFVFIVEYPWKVRPFYTMRKDDEPSWTYSFDLLYRGLEIVTGGQREHRYHRLLENLRDKGLDAESFQFYLDFFKHGAPPHGGAGMGLERIVMQTLKLENIREARMLPRDTERITP

SEQ ID NO: 2301 - protein, 423 aa, Brucella melitensis
MSKVSNGGGDSKNTLYCSFCGKSQHEVRKLIAGPTVFICDECVELCMDIIREENKSSMVKSREGVPTRRQIMAVLDDYVIGQKDAKRVLSVAVHNHYKRLAHQSKNSDIELAKSNILLVGPTGCGKTYLAQTLARIIDVPFIMADATTLTEAGYVGEDVENIILKLLQAADYNVERARSIVYIDEVDKISRKSDNPSITRDVSGEGVQQALLKIMEGTVASVPPQGGRKHPQQEFLQVDTTNILFICGGAFAGLDRIISARGEKTSIGFGATVKSVDERRIGEVFKELEPEDLLKFGLIPEFVGRLPVIATLEDLDVDALVQILTEPKNALVKQYQRLFDMENVELVFHDDALRAIANKAVERKTGARGLRSIMEKILLDTMFELPTLEGVREVVISGDVVDGSARPLYIYAERQDEKGNVSA

SEQ ID NO: 2302 - protein, 83 aa, Pneumocystis jiroveci
HRDLKPQNLLIDREGNLKLADFGLARAFGVPLRGYTHEVVTLWYRAPEVLLGGRQYATALDIWSIGCIFAEMATKKPLFPGDS

SEQ ID NO: 2303 - protein, 224 aa, Candida albicans
MSGFRVLDLVKPFSPFLPEVIAPERKVQFQQRVMWTIITLLIFLVMSEIPLYGIASSDSSDPLFWLRMMLASNRGTLMELGISPIVSSGMLFQLLQGTKIIHVDMQNKNDRETFQTAQKLLAILLAVGQATVYVLTGMYGPPSSLGVGVCSLLILQLVFASTIVILLDELLQKGYGLGSGVSLFTATNTCEQVFWKAFAPTTSTSAKGTEFDGAVVAMFHLLGS

SEQ ID NO: 2304 - protein, 320 aa, Candida albicans
MSGPVNSVSKQMNVDTDIITLTRFILQEQQTVAPTATGELSLLLNALQFAFKFIAHNIRRAELVNLIGVSGSANSTGDVQKKLDVIGDEIFINAMRSSNNVKVLVSEEQEDLIVFPGGGTYAVCTDPIDGSSNIDAGVSVGTIFGVYKLQEGSTGGISDVLRPGKEMVAAGYTMYGASAHLALTTGHGVNLFTLDTQLGEFILTHPNLKLPDTKNIYSLNEGYSNKFPEYVQDYLKDIKKEGYSLRYIGSMVADVHRTLLYGGIFAYPTLKLRVLYECFPMALLMEQAGGSAVTIKGERILDILPKGIHDKEFYCVGIQG

SEQ ID NO: 2305 - protein, 801 aa, Euphorbia esula
AILIIHIPARFRNFNLNDQRFVKKGDKGVDLLASLCNQYDISEDELKKILEKTNNLIVDILKKTPRSASECKNENLENIDADGLVYYDDLMEEASLQSSLNILQRDYEDSTSCKGELDETVFINEEDSLLGSGNLSGGAVNVTGTKRKFDMISSPTKTISSPFSPTKTMSSPLSPFRSPASRSNGILGGLYSKIADTPVTTAMTTAKWLRTVISPLPSKPSSQLERFLTSCDRDVTNDVTRRAQIILEAIFPSSGLGKYSITGGLQNTNLMENIWAEQRRLEALKLSYRVLEAMCTAEAQVLHANNLTSLLTNERFHRCMLSCSAELVLATHKTVTMLFPAVLERTGITAFDLSKVIESFIRHEESLPRELRRHLNSLEERLLESMVWEKGSSMYNSLTVARPSLSSEINHLGLLAEPMPSLDAIAVRINFSSGSLPPLPSVQKQESSPGKSVDIRSPKRPCPDYRSVLVERNSFTSPVKDRLLALSNLKSKIPPPLQSAFASPTRPNPGGGGETCAETAISIFFCKINKLAAVRINGMIERLQQSHHHIRENVYRLFQQILSHRTSLFFNRHIDQIILCCFYGVAKISKVNLTFREIICNYRKQPQCKPQVFRSVFVDWSSSRQNGRTGQDHVDIITFYNEIFIPAAKPLLVEVGSSGTITKSTQVPEVINSKDGQCPQSPKVSPFPSLPDMSPKKVSASHNVYVSPLRTSKMDALISHSSKSYYACVGESTHAYQSPSKDLTAINNRLNSNRKVRGTLNFDDVDVGLVSDSMVANSLYLQNGSCASSSGALIKPEQPDT

SEQ ID NO: 2306 - protein, 281 aa, Brassica oleracea
MSAASLFNLSLIRFRSLSSSRFLRLPQSPLRSVSISPRKFRAFSGAAMTTDAKDAGMDAVQRRLMFEDECILVDETDRVVGHDSKYNCHLMENIEAKNLLHRAFSVFLFNSNYELLLQQRSKAKVTFPLVWTNTCCSHPLYRDSELIEENALGVRNAAQRKLLDELGIVAEDVPVEEFTPLGRMLYKAPSDGKWGEHELDYLLFIVRDVKVEPNPDEVAEIKYVSREGLKELVRKADAGEEGLKLSPWFRLVVDNFLMKWWDHVEKGTLGEAVDMKTIHKL

SEQ ID NO: 2307 - protein, 121 aa, Salmonella typhimurium
MSITKDQIIEAVSAMSVMDVVELISAMEEKFGVSAAAAVAVAAGPAEAAEEKTEFDVILKAAGANKVAVIKAVRGATGLGLKEAKDLVESAPAALKEGVSKDDAEALKKSLEEAGAEVEVK

SEQ ID NO: 2308 - protein, 118 aa, Micrococcus luteus
MNKEQILEAIKAMTVLELNDLVKAIEEEFGVTAAAPVVAGGAAAAAEEKTEFDVVLASAGAEKIKVIKVVREITGLGLKEAKEVVDNAPKALKEGVSKDEAEEIKAKLEEVGASVEVK

SEQ ID NO: 2309 - protein, 122 aa, Geobacillus stearothermophilus
MTKEQIIEAVKNMTVLELNELVKAIEEEFGVTAAAPVVVAGGAAAGAEAAAEKTEFDVILADAGAQKIKVIKVVREITGLGLKEAKDLVDNTPKPIKEGIAKEEAEEIKAALEEAGAKVEIK

SEQ ID NO: 2310 - protein, 122 aa, Halanaerobium praevalens
MNKEEIMSAIEEMSVLELSELVEDLEEKFGVSAAAPVAVAGGAAGAGAAAEEKSEFDVFLADIGGKKIKVIKAVRELTGLGLKEAKGVVDDAPGNVKEGLSKEDAEEMKEKLEEAGATVELK

SEQ ID NO: 2311 - protein, 189 aa, Spinacia oleracea
MAATTTMATLNLPSLTSHPNSSTFPKHPQPLQFPFRTTTNPISLSSTRTTRLRPIAAVEAPEKIEQLGTQLSGLTLEEARVLVDWLQDKLGVSAASFAPAAAVAAPGAPADAAPAVEEKTEFDVSIDEVPSNARISVIKAVRALTSLGLKEAKELIEGLPKKLKEGVSKDDAEDAKKQLEDAGAKVSIV

SEQ ID NO: 2312 - protein, 654 aa, Saccharomyces cerevisiae
MLAAKNILNRSSLSSSFRIATRLQSTKVQGSVIGIDLGTTNSAVAIMEGKVPKIIENAEGSRTTPSVVAFTKEGERLVGIPAKRQAVVNPENTLFATKRLIGRRFEDAEVQRDIKQVPYKIVKHSNGDAWVEARGQTYSPAQIGGFVLNKMKETAEAYLGKPVKNAVVTVPAYFNDSQRQATKDAGQIVGLNVLRVVNEPTAAALAYGLEKSDSKVVAVFDLGGGTFDISILDIDNGVFEVKSTNGDTHLGGEDFDIYLLREIVSRFKTETGIDLENDRMAIQRIREAAEKAKIELSSTVSTEINLPFITADASGPKHINMKFSRAQFETLTAPLVKRTVDPVKKALKDAGLSTSDISEVLLVGGMSRMPKVVETVKSLFGKDPSKAVNPDEAVAIGAAVQGAVLSGEVTDVLLLDVTPLSLGIETLGGVFTRLIPRNTTIPTKKSQIFSTAAAGQTSVEIRVFQGERELVRDNKLIGNFTLAGIPPAPKGVPQIEVTFDIDADGIINVSARDKATNKDSSITVAGSSGLSENEIEQMVNDAEKFKSQDEARKQAIETANKADQLANDTENSLKEFEGKVDKAEAQKVRDQITSLKELVARVQGGEEVNAEELKTKTEELQTSSMKLFEQLYKNDSNNNNNNNGNNAESGETKQ

SEQ ID NO: 2313 - protein, 418 aa, Chlamydia muridarum
MNKKRVVVTGMGIVSCLGNEVESFYDSLLAGISGVRTITSFPCDDYATRFAGWIEEFNSEPYLDKKQARRVDPFITYAVVAAKKAIAMSRWDQETLPANPHRCGVIIGSGMGGLRTLDEGIEKLSAGNRKLSPFFIPYIITNMAPALIAMDYGLMGPNYSISTACATANYCIDAAYQHLVEGRADVIVCGGTEAAINRVGLAGFIANRALSERNDAPEQASRPWDRDRDGFVLGEGAGVLVLETLDNALKRGAPIFAEVLGTYTTCDAFHITAPRDDGEGITACILGALNKAGIPKERVNYINAHGTSTPLGDLSEVLALKKAFGSHIKNLRMNSTKSLIGHCLGAAGGVEAVATIQAIQTGKLHPTINIENPIAEIEEFDVVANKSQDWDVDVAMSNSFGFGGHNSTILFSRYEPSL

SEQ ID NO: 2314 - protein, 335 aa, Oryza sativa; identical to SEQ ID NO: 716

SEQ ID NO: 2315 - protein, 731 aa, Oryza sativa; identical to SEQ ID NO: 779

SEQ ID NO: 2316 - protein, 716 aa, Arabidopsis thaliana
MSGSVSGCGSGGCSIVWFRRDLRVEDNPALAAAVRAGPVIALFVWAPEEEGHYHPGRVSRWWLKNSLAQLDSSLRSLGTCLITKRSTDSVASLLDVVKSTGASQIFFNHLYDPLSLVRDHRAKDVLTAQGIAVRSFNADLLYEPWEVTDELGRPFSMFAAFWERCLSMPYDPESPLLPPKKIISGDVSKCVADPLVFEDDSEKGSNALLARAWSPGWSNGDKALTTFINGPLLEYSKNRRKADSATTSFLSPHLHFGEVSVRKVFHLVRIKQVAWANEGNEAGEESVNLFLKSIGLREYSRYISFNHPYSHERPLLGHLKFFPWAVDENYFKAWRQGRTGYPLVDAGMRELWATGWLHDRIRVVVSSFFVKVLQLPWRWGMKYFWDTLLDADLESDALGWQYITGTLPDSREFDRIDNPQFEGYKFDPNGEYVRRWLPELSRLPTDWIHHPWNAPESVLQAAGIELGSNYPLPIVGLDEAKARLHEALSQMWQLEAASRAAIENGSEEGLGDSAEVEEAPIEFPRDITMEETEPTRLNPNRRYEDQMVPSITSSLIRPEEDEESSLNLRNSVGDSRAEVPRNMVNTNQAQQRRAEPASNQVTAMIPEFNIRIVAESTEDSTAESSSSGRRERSGGIVPEWSPGYSEQFPSEENGIGGGSTTSSYLQNHHEILNWRRLSQTGYVKSAFGGAKGEEHHKGCNSGEIWLDCKPSTFGTV

SEQ ID NO: 2317 - protein, 769 aa, Arabidopsis thaliana
MADKAKVEEMDWEGIDGVRMTWNLWPRTKVEASKCVIPLAASISPIRRHPLILDLPYAPLDCKTCKALLNAFARVDFAAMNWVCPFCYHRNHFPSHYHSISEINLPGELYPQYTTVEYTLPPDPSRVPPPPVFVFVLDTCMIEEELGYAKSALKQAIGLLPENALVGFVSFGTQAHVHELGFSEMSKVFVFKGNKEVTKDQILDQLGLGSSSRRAPTSGFSKGAQNGFQSSGVDRFLLPASECEYTLDLLLDELQSDQWPVQPGHRPQRCTGVALSVAAGLLGACLPGTGARIVALVGGPCTEGPGTIISKDLSDPVRSHKDLDKDAAPYYKKAVKFYDSIAKQLVAQGHVLDLFASALDQVGVAEMKVAVESTGGLVVLSESFGHSVFKDSFKRMFEDGEHSLGLCFNGTLEINCSKDIKIQGVIGPCSSLEKKGPNVADTVIGEGNTSAWKLCGLDKSTCLTVFFDLSSTGSTAPGALNQQLYLQFITRYQNSEGKSLARVTTLTRQWVDTAVSTENLVQGFDQETAAVVMARLTSLKMETEEGFDATRWLDRTLIRLCSKFGEYRKDDPTSFTLKPYLTLFPQFMFNLRRSQFVQVFNNSPDETAYFRMLLNRENISNAIVMIQPSLTSYSFNSGPQAALLDVASIAADKILLLDAYFSVVVFHGMTISQWRNMGYHHQPEHEAFAQLLQAPQEDSQMLVRERFPVPRLVVCDQHGSQARFLLAKLNPSATYNNANEMSAGSDIIFTDDVSLQVFIEHLQKLAVQS

SEQ ID NO: 2318 - protein, 499 aa, Arabidopsis thaliana
MATNYNEKLLLNYVPVYVMLPLGVVNVENVFADPETLETQLKRLKEEAGVDGVMVDVWWGIIESKGPKQYDWTAYKTLFQLIARLGLKIQAIMSFHQCGGNVGDIVTIPIPQWVRDVGDNDPDIYYTNRKGTRDIEYLSIGVDNLPLFAGRTAVQVLYSDYMSSFKENMADLIEAGVIVDIEVGLGPAGELRYPSYPQSQGWVFPGIGEFQCYDKYLKKDFKEAAAKAGHPEWDLPEDAGEYNDKPEETGFFKKDGTYVSEKGKFFMTWYSNKLIFHGDQILGEANKIFAGLKVNLAAKVSGIHWLYNHHSHAAELTAGYYNLFKRDGYRPIARMLSKHYGILNFTCLEMKDTDNTAEALSAPQELVQEVLSKAWKEGIEVAGENALETYGAKGYNQILLNARPNGVNPNGKPKLRMYGFTYLRLSDTVFQENNFELFKKLVRKMHADQDYCGDAAKYGHEIVPLKTSNSQLTLEDIADAAQPSGAFKWDSETDLKVDG

SEQ ID NO: 2319 - protein, 498 aa, Arabidopsis thaliana
MKFTHEKTFTPEGETLEKWEKLHVLSYPHSKNDASVPVFVMLPLDTVTMSGHLNKPRAMNASLMALKGAGVEGVMVDAWWGLVEKDGPMNYNWEGYAELIQMVQKHGLKLQVVMSFHQCGGNVGDSCSIPLPPWVLEEISKNPDLVYTDKSGRRNPEYISLGCDSVPVLRGRTPIQVYSDFMRSFRERFEGYIGGVIAEIQVGMGPCGELRYPSYPESNGTWRFPGIGEFQCYDKYMKSSLQAYAESIGKTNWGTSGPHDAGEYKNLPEDTEFFRRDGTWNSEYGKFFMEWYSGKLLEHGDQLLSSAKGIFQGSGAKLSGKVAGIHWHYNTRSHAAELTAGYYNTRNHDGYLPIAKMFNKHGVVLNFTCMEMKDGEQPEHANCSPEGLVKQVQNATRQAGTELAGENALERYDSSAFGQVVATNRSDSGNGLTAFTYLRMNKRLFEGQNWQQLVEFVKNMKEGGHGRRLSKEDTTGSDLYVGFVKGKIAENVEEAALV

SEQ ID NO: 2320 - protein, 1102 aa, Arabidopsis thaliana
MSVWNYAVTAQKPTCVTHSCVGNFTSPQELNLIVAKSTRIEIHLLSPQGLQTILDVPLYGRIATMELFRPHVSIVFLLNTFLCLRVKHKTFCLLQLKDINSVFFNGIMSPLSLLQGAMGDVSDRIGRPTDNGQIGIIDPDCRVIGLHLYDGLFKVIPFDNKGQLKEAFNIRLEELQVLDIKFLYGCTKPTIAVLYQDNKDARHVKTYEVSLKDKNFVEGPWSQNNLDNGADLLIPVPSPLCGVLIIGEETIVYCSANAFKAIPIRPSITKAYGRVDLDGSRYLLGDHAGLIHLLVITHEKEKVTGLKIELLGETSIASSISYLDNAVVFVGSSYGDSQLIKLNLQPDAKGSYVEILEKYVNLGPIVDFCVVDLERQGQGQVVTCSGAYKDGSLRIVRNGIGINEQASVELQGIKGMWSLKSSIDEAFDTFLVVSFISETRILAMNIEDELEETEIEGFLSEVQTLFCHDAVYNQLVQVTSNSVRLVSSTTRELRNKWDAPAGFSVNVATANASQVLLATGGGHLVYLEIGDGTLTEVKHVLLEYEVSCLDINPIGDNPNYSQLAAVGMWTDISVRIFVLPDLTLITKEELGGEIIPRSVLLCAFEGISYLLCALGDGHLLNFQLDTSCGKLRDRKKVSLGTRPITLRTFSSKSATHVFAASDRPAVIYSNNKKLLYSNVNLKEVSHMCPFNSAAFPDSLAIAREGELTIGTIDDIQKLHIRTIPIGEHARRICHQEQTRTFAISCLRNEPSAEESESHFVRLLDAQSFEFLSSYPLDAFECGCSILSCSFTDDKNVYYCVGTAYVLPEENEPTKGRILVFIVEEGRLQLITEKETKGAVYSLNAFNGKLLASINQKIQLYKWMLRDDGTRELQSECGHHGHILALYVQTRGDFIAVGDLMKSISLLIYKHEEGAIEERARDYNANWMTAVEILNDDIYLGTDNCFNIFTVKKNNEGATDEERARMEVVGEYHIGEFVNRFRHGSLVMKLPDSDIGQIPTVIFGTVSGMIGVIASLPQEQYAFLEKLQTSLRKVIKGVGGLSHEQWRSFNNEKRTAEAKGYLDGDLIESFLDLSRGKMEEISKGMDVQVEELCKRVEELTRLH

SEQ ID NO: 2321 - protein, 504 aa, Arabidopsis thaliana
MVGSEVLEECGEKISKKESKKRAAKLEKLLRKQEREEATSSSLSLEEEDESCSSNYGDVTTNELQSAVEGKELTDVSNLVEEIVGSEVSIRGRLHKNRLVGTKLFVILRESGFTVQCVVEETRVGANMIKFVKQLSRESVVELIGVVSHPKKPLTGTTQQVEIHVRKMYCLSRSLPNLPLVVEDAARSESDIEKSGKDTRLNNRVLDIRTPANQAIFRIQCQVQIAFREYLQSKGFLEIHTPKLIAGSSEGGSAVFRLDYKGQPACLAQSPQLHKQMAICGDMRRVFEVGPVFRAEDSFTHRHLCEFVGLDVEMEIRMHYSEIMDLVGELFPFIFTKIEERCPKELESVRKQYPFQSLKEAGEEVDPLGDLNTESERKLGQLVLEKYKTEFYMLHRYPSAVRPFYTMPYENDSNYSNSFDVFIRGEEIMSGAQRIHDPELLEKRARECGIDVKTISTYIDAFRYGAPPHGGFGVGLERVVMLLCALNNIRKTSLFPRDSQRLTP

SEQ ID NO: 2322 - protein, 558 aa, Arabidopsis thaliana
MSSESEIPPLSSSTAAAEESGEKTSKKAAKKEAAKLEKLRRRQEQEEATRRTASISLEENDEFSNNYGDVTLTELQSSADPKAGKWIEAVEGKEWTDVSDLVEEMLESEVLIRGRVHTNRPTSNKLGFVVLRESGSTVQCVVSQSEKTKVGANMVKYLKQLSRESFVDVIGVVTLPKEPLTGTTQQVEIQVRKVYCINKSLAKLPLSVEDAARSEADIEASLQTPSPAARVNQDTRLNYRVLDLRTPANQAIFQLQYEVEYAFREKLRFKNFVGIHTPKLMAGSSEGGSAVFRLEYKGQPACLAQSPQLHKQMAICGDLRRVFEVGPVFRAEDSFTHRHLCEFVGLDVEMEIRKHYSEIMDLVDELFVFIFTSLNERCKKELQAVGKQYPFEPLKFLPKTLRLTFEEGVQMLKEAGVEVDPLGDLNTESERKLGQLVLEKYNTEFYILHRYPKAVRPFYTMTCADNPLYSNSFDVFIRGEEIISGAQRVHIPEVLEQRAGECGIDVKTISTYIDSFRYGAPLHGGFGVGLERVVMLFCALNNIRKTSLFPRDPQRLSP

SEQ ID NO: 2323 - protein, 127 aa, Arabidopsis thaliana
MASNTTFLFSTVTLLIILLNTTVSGRDLPAESSTNIAARLQSGGLMECWNALYELKSCTNEIVLFFLNGETKLGVSCCESVDIITTNCWPAMLTSLGFTPEEANVLRGFCQNPNSGDSSPAPSPKIV

SEQ ID NO: 2324 - protein, 510 aa, Lilium longiflorum
MANIDIEGILKELPADGRVPKTKLVCTLGPSSRSVPMLEKLLRAGMNTARFNFSHGTHEYHQETLDNLRIAMQNTQILCAVVLDTKGPEIRTGFLKDGKAVQPKEGQEIIVSTDYDLKGGGNTITMSYKKLPVDMKPGGTILCADGSISLTVLSCDPDAGTVRCRCENTALLGERKNVNLPGVVVDLPTLTEKDKEDILEWGVPNNIDMIALSFVRKGSDLVNVRQVLGSHAKNIKLMSKVENQEGVVNFDEILKETDAFMVARGDLGMEIPVEKIFLAQKLMIYICNLAGKPVVTATQMLESMIKSPRPTRAEATDVANAVLDGTDCVMLSGESAAGAYLEIAVKVMAKICIEAESSLDYDAIFKEMIRSAPLPMSPLESLASSAVRTANKAKAALIVVLTRGGTTAKLVAKYRPAVPILSVVVPVLTSDSFDWNVSDESPARHSLIYRGLIPLLAEGSAKATDAESTEVILEAALKSATARRLCKPGDSIVALHRIGVASVIKICIVK

SEQ ID NO: 2325 - protein, 501 aa, Sinapis alba
MSTNKKTIVWFRRDLRIEDNPALAAAAHEGSVFPVFIWCPEEEGQFYPGRASRWWMKQSLAHLRQSLKALGSELTLIKTHSTVSAILDCVRATGATKVVFNHLYDPVSLVRDHTVKEKLVERGISVQSYNGDLCMSPGRYTVKRANLLLVLILTGKKCLDMSVESVVLPPPWRLMPLSAAETVWACSVEELGLENEAEKPSNALLTRAWSPGWSNADKILNEFIEKQLIDYAKNSKKVVGNSTSLLSPYLHFGEISVRRVFQCARMKQIIWARDKNGEGEESADLFLRGIGLRDYSRIICFNFPFTHEQSLLSHLRFFPWDADVDKFKAWRQGRTGYPLVDAGMRELWATGWMHNRIRVIVSSFAVKFLLLPWKWGMKYFWDTLLDADLECDIIGWQYISGSLPDGHELDRLDNPAIQGAKYDPEGEYIRQWLPELARLPTEWIHHPWDAPLTVLKASGVELGTNYAKPIVVIDTARELLTKAISRTREAQIMIGACGDEM

SEQ ID NO: 2326 - protein, 852 aa, Oryza sativa; identical to SEQ ID NO: 685

SEQ ID NO: 2327 - protein, 175 aa, Oryza sativa; identical to SEQ ID NO: 727

SEQ ID NO: 2328 - protein, 324 aa, Neisseria meningitidis
MDTLTRFLPEHLQQNQLPEALGGVLLSVVSACTEINAKVRLGALAGVLGMAGTGNIQGEDQKKLDVIANNIMIDTLKANPAVAGLASEEEDSFVSAGENGRYLVLFDPLDGSSNIDVNISVGTIFSILEKPEGALATESFLQTGRQQLAAGYVLYGPQTQLVFTFGHGVYMFTLNAENEFVLTKEKPKVPESTKEFAINMSNRRHWLPPVQQYIDELLAGETGTRGKNYNMRWVASMVAEIHRILMRGGVFMYPQDKRDPSKPGKLRLMYEANPMALILEQAGASASNARQDILGIRPESLHQRVAVIMGSSEEVDYLNRLHSK

SEQ ID NO: 2329 - protein, 414 aa, Neisseria meningitidis
MSNENRTCSFCGKSKSHVKHLIEGENAFICDECVSNCIEILHEDGNDGTPSESAGGEPEESGKLPTPAEIVANLNDHVIGQEQAKKALAVSVYNHYKRLRHPKARANVELSKSNILLIGPTGSGKTLLAQSLARKLDVPFVMADATTLTEAGYVGEDVEQIITKLLGKCDFDVEKAQRGIVYIDEIDKISRKSDNPSITRDVSGEGVQQALLKLIEGTVASVPPQGGRKHPNQEFINVDTTNILFICGGAFAGLEKVIRQRTEKGGIGFGASVHSKDENADITKLFGIVEPEDLIKFGLIPELIGRLPVIATLEELDEDALINILTEPKNALVKQYQALFGMENVELEFEEGALRSIARQAMERKTGARGLRSIVERCLLDTMYRLPDLQGLKKVVVGKAVIEEGREPELVFES

SEQ ID NO: 2330 - protein, 1035 aa, Populus tremula
MSPAALKNMEENKTTVMTTSHSSNDGGETVKGYSDAVEVRFSDFCKSGLALDENTCTQAIKLFKDTKHLLMTNVSSIGNGTSEEAERFWFAFVSYSVKRLSEKNRDDAQQKSDDPGLTLCQILRLAKLNIVDFFKELPHFIVKAGPILSNIYGADWENRLEAKELQANFVHLSILSRHYKRACRELFLTSDASSDKQPAISNEATHVSDHHRFGWLLFLALRVHAFSRFKDLVTCTNGLVSVLAVLIIHVPVCFRNFSFNDSQWFVRKGDKGVDLLASLCNKYDTSEEVLRKSMETTNNLIANILKKKPHSASEYKNENLVNINPDGLIYYEDLMEESSLQSSLNILEKDYDDAIRNKAELDERVFINEEDSLLGSGSVSAGSLNITGAKRKFDLISSPTKTITSPLSPHRSPASHANGIPGSANSKMAATPVSTAMTTAKWLRTIISPLPSKPSAQLERFLVSCDKDVTNDVIRRAQIILEAIFPSSSLGERCVTGSLQSTNLMDNIWAEQRRLEALKLYYRVLESMCTAEAQILHATNLTSLLTNERFHRCMLACSAELVVATYKTVTMLFPAVLERTGITAFDLSKVIESFIRHEESLPRELRRHLNSLEERLLDSMVWEKGSSLYNSLTVARTALSAEINRLGLLAEPMPSLDAIAMHINFSSGCLPPVPSLQKHETSPGSGQNGDLRSPKRPCTDFRSVLVERNSFTSPVKDRLLGNLKSKLPPPPLQSAFASPTRPNPGGGGETCAETGINVFFTKINKLAAVRINGMIEKLQPSQQHIRENVYRLFQLILSHQTSLFFNRHIDQIILCCFYGVAKISKLNLTFREIIYNYRRQPHCKTLVFRSVFVDWSSARHNGRTGQDHVDIITFYNEIFIPAAKPLLVDVGSAGTTVKASNVPEVGNNKDGQCPASPKVSPFPSLPDMSPKKVSSVHNVYVSPLRSSKMDALISNSSKSYYACVGESTHAYQSPSKDLNAINNRLNGNRKARGTLNLDNDVGLVSDSMVANSLGLQNGNCASTSGAALKSEQSDS

SEQ ID NO: 2331 - protein, 681 aa, Arabidopsis thaliana
MSGSVSGCGSGGCSIVWFRRDLRVEDNPALAAAVRAGPVIALFVWAPEEEGHYHPGRVSRWWLKNSLAQLDSSLRSLGTCLITKRSTDSVASLLDVVKSTGASQIFFNHLYDPLSLVRDHRAKDVLTAQGIAVRSFNADLLYQPWEVTDELGRPFSMFAAFWERCLSMPYDPESPLLPPKKIISGDVSKCVADPLVFEDDSEKGSNALLARAWSPGWSNGDKALTTFINGPLLEYSKNRRKADSATTSFLSPHLHFGEVSVRKVFHLVRIKQVAWANEGNEAGEESVNLFLKSIGLREYSRYISFNHPYSHERPLLGHLKFFPWAVDENYFKAWRQGRTGYPLVDAGMRELWATGWLHDRIRVVVSSFFVKVLQLPWRWGMKYFWDTLLDADLESDALGWQYITGTLPDSREFDRIDNPQFEGYKFDPNGEYVRRWLPELSRLPTDWIHHPWNAPESVLQAAGIELGSNYPLPIVGLDEAKARLHEALSQMWQLEAASRAAIENGSEEGLGDSAEVEEAPIEFPRDITMEETEPTRLNPNRRYEDQMVPSITSSLIRPEEDEESSLNLRNSVGDSRAEVPRNMVNTNQAQQRRAEPASNQVTAMIPEFNIRIVAESTEDSTAESSSSGRRERSGGIVPEWSPGYSEQFPSEENRIGGGSTTSSYLQNHHEILNWRRLSQTG

SEQ ID NO: 2332 - protein, 469 aa, Glycine max; identical to SEQ ID NO: 562

SEQ ID NO: 2333 - protein, 469 aa, Glycine max
MQALHSPTLRTSPLDPLRGPNNAAAKRRASSAKRVFFVSATVAPKVSAPQRQKDSKKRVVITGMGLASVFGNDVEGYYEKLLAGESGITPIDRFDASKFPTRFGGQIRGFSAEGYIDGKNDRRLDDCLRYCIVAGKKALENADLAPDNHSKIDKERAGVLVGSGMGGLTVFSDGVQALIEKGHRKITPFFIPYAITNMGSALLGIDLGFMGPNYSISTACATSNYCFYAAANHIRRGEADLMIAGGTEAAIIPIGLGGFVACRALSQRNDDPKTASRPWDKDRDGFVMGEGAGVLVMESLEHAMKRGAPIIAEYLGGAVNCDAYHMTDPRSDGLGVSTCIQSSLEDAGVSPEEVNYINAHATSTLAGDLAEINAIKKVFKDTSGIKINATKSMIGHCLGAAGGLEAIATVKAITTGWLHPTINQFNPEPAVDFDTVANVKQQHEINVAISNSFGFGGHNSVVAFSAFRP

SEQ ID NO: 2334 - protein, 295 aa, Brassica napus
MQALQSSSLRASPPNPLRTPSNRQSHQITNARPTTRRSFISASASVSAPKRETDPKKRVVITGMGLVSVFGNDVDAYYEKLLSGESGISLIDRFDASKFPTRFGGQIRGFSSEGYIDGKNERRLDDCLKYCIVAGKKALESANLGGDKLNTIDKQKAGVLVGTGMGGLTVFSDGVQALVEKGHRRISPFFIPYAITNMGSALLAIDLGLMGPNYSISTACATSNYCFYAAANHIRRGEADMMVAGGTEAAIIPIGWEVLLLVGHCRREMMTLKRLQGHGINREMALSWVKELVFW

SEQ ID NO: 2335 - protein, 655 aa, Chlamydia muridarum
MSEKRKSNKIIGIDLGTTNSCVSVMEGGQPKVIASSEGTRTTPSIVAFKGSETLVGIPAKRQAVTNPEKTLASTKRFIGRKFSEVESEIKTVPYKVAPNSKGDAVFEVENKLYTPEEIGAQILMKMKETAEAYLGETVTEAVITVPAYFNDSQRASTKDAGRIAGLDVKRIIPEPTAAALAYGIDKEGDKKIAVFDLGGGTFDISILEIGDGVFEVLSTNGDTHLGGDDFDEVIINWMLGEFKKQEGIDLSKDNMALQRLKDAAEKAKIELSGVSSTEINQPFITIDANGPKHLALTLTRAQFEHLASSLIERTKQPCAQALKDAKLSASDIDDVLLVGGMSRMPAVQAVVKEIFGKEPNKGVNPDEVVAIGAAIQGGVLGGEVKDVLLLDVIPLSLGIETLGGVMTPLVERNTTIPTQKKQIFSTAADNQPAVTIVVLQGERPMAKDNKEIGRFDLTDIPPAPRGHPQIEVTFDIDANGILHVSAKDAASGREQKIRIEASSGLKEEEIQQMIRDAELNKEEDKKRREASDIKNEADGMIFRAEKAIKDYQDKIPADLVKEIEEQIEKVRQAVKEDASTTAIKAASDELSARMQKIGEAMQAQSASAANAQGGPNINSEDLKKHSFSTRPPAGDNSSSTDNIEDADVEIVDKPE

SEQ ID NO: 2336 - protein, 349 aa, Sinorhizobium meliloti
MSGATLEAYLASCTTHGDELSRDVAAVIQRLAKAALDIRKLVNQGALGTVFNGMHSGSNTDGDVQKDLDILCDDQFLSCLQGAPVACYASEELENPVLLDPAARLAVAIDPLDGSSNIDNNISIGTIFSVLPAAKGPDVDPSHSFLQPGNRQLAAGFFVYGPQTALVLSLGRGTDIFIFSSRLGCFVDAYKSVGIPDRANEFAINMSNYRHWEEAIRLYVDDCLAGSEGPRERDFNMRWIASLVAEAYRILVRGGIFLYPADSRKGYSHGRIRLVYEANPIAFIVENAGGSATTSVDRILDLVPESLHQRVPLVFGSRREVGRITRYHVDPNMIGERAPLFGKRGLFRA

SEQ ID NO: 2337 - protein, 122 aa, Citrus greening
MSNIESIVEKLSSLTLIEAAELSKRLEKEWGVSASAPVSVVAPVAAEAGSAASEKTEFEVVLKGFDDPKKKIAVIKEVRAITDLGLKEAKELVESAPKSLKTGLSKDEANEMKKKLEDAGAT

SEQ ID NO: 2338 - protein, 418 aa, Chlamydia trachomatis
MNKKRVVVTGMGIVSCLGNEVESFYDSLLAGISGVRTITSFPCDDYATRFAGWIEEFNSEPYLDKKQARRVDPFITYAVVAAKKAIAMSRWDQDTLPADSHRCGVIIGSGMGGLRTLDEGIEKLSAGNRKLSPFFIPYIITNMAPALIAMDYGLMGPNYSISTACATANYCIDAAYQHLIEGRADVIVCGGTEAAINRVGLAGFIANRALSERNDAPEQASRPWDRDRDGFVLGEGAGILVLETLDNALKRGAPIFAEVLGTYTTCDAFHITAPRDDGEGITACILGALNKAGIPKERVNYINAHGTSTPLGDLSEVLALKKAFGSHVKNLRMNSTKSLIGHCLGAAGGVEAVATIQAIQTGKLHPTINVENPIAEIEEFDVVANKAQDWDVDVAMSNSFGFGGHNSTILFSRYEPSL

SEQ ID NO: 2339 - protein, 415 aa, Aquifex aeolicus
MKRRVVITGIGAVTPLGTGVKKFWENLVKGVSGVDYIKSFNPDEYGIPVKIAAEVKDFNPEDFMDKKEARKASRFVQFAIAAVKEALEDSGLLESEYDPYRVGVIIGTGIGGLKDIEDQTLILKEKGARRVSPFFIPYGISNMASGLVAIKWGFKGPNYCVTSACATGNHAIGDAFRLIQKGDIDIAIAGGTEAAITPLGVAGFASMKALSTRNDEPQKASRPFDRDRDGFVMGEGAGILILEEYERAKARGAKIYAELVGYGATDDAYHITSPHECGEGAYECMRLALEDAGIKPEEVDYINAHGTSTPLNDKTETMAIKQLFGEHAYKLKISSNKSMIGHLLGAAAAVEAVATIKTIETGVIPPTINLENPDPECDLDYVPNKAVEYPVRVALSNAFGFGGTNATLVFRKIEE

SEQ ID NO: 2340 - protein, 314 aa, Dunaliella tertiolecta
MDAYEKLEKIGEGTYGKVYKARDINTGKLVALKKTRLEMEEEGVPSTTLREVSLLLMLSESNHVVKLIAVEHVEENGKPCLYLVFEYLSTDMKKWMDRNGRGPAHPLPKPAIKSLTYQLIKGLAHCHKHGVMHRDLKPQNLLVDDSIMCCKIADLGLGRAFSIPIKSYTHEIVTLWYRAPEVLLGSTHYSTPVDMWSVGCIFAELVRKTPLFPGDCELQQLLHIFKLLGTPNEEVWPGVSKLRDWHEFPQWHPQDLSRIFPTLEPEGVDLLKRMIEYDPAKRISAKEALKHPYFDDPMIREVDQQENPEVRARD

SEQ ID NO: 2341 - protein, 497 aa, Arabidopsis thaliana
MAMEQRPKTKIVCTLGPASRSVPMVEKLLMAGMSVARFNFSHGSYEYHQETLDNLRQAMLNTGMLCAVMLDTKGPEIRTGFLKDGKPIQLKQGQEITISTDYDLKGDEKTICMSYKKLAQDVNPGMVILCADGTISLKVLSCDKEKGTVRCRCENTSMLGERKNVNLPGVVVDLPTLTEKDKQDILEWGVPNQIDMIALSFVRKGSDLVQVRKLLGKHAKTILLMSKVENQEGVANFDDILINSDAFMIARGDLGMEIPIEKIFLAQKVMIYKCNFMGKPVVTATQMLESMIKSPRPTRAEATDVANAVLDGTDCVMLSGETAAGAYPELAVRTMAKICVEAESTLDYGDIFKRIMLHAAVPMSPMESLASSAVRTATSSRATLMMVLTRGGSTARLVAKYRPGIPILSVVVPEITSDSFDWACSNEAPARHSLIYRGLVPVLYAGSARASIDESTEETLEFASEYGKKKQLCKTGDSVVALFRTGNAIVIKILTVK

SEQ ID NO: 2342 - protein, 235 aa, Photobacterium leiognathi
ASDGIMVARGDLGVEIPVEEVIFAQKMMIEKCNRARKVVITATQMLDSMIKNPRPTRAEAGDVANAIMDGTDAVMLSGESAKGKYPIEAVTIMAQICARTDDVVKPELGSRLDSPRLRITEAVCKGAVDTAEKLNAPLIIVATEAGKSARSVRKYFPTARILAVTTNTKTAAQLCLSKGVTPVVVDSIESTDAFYLRGKELALETGLGAKGDIVVMVSGALVASGTTNTASVHVL

SEQ ID NO: 2343 - protein, 485 aa, Chlamydia trachomatis
MIARTKIICTIGPATNTPEMLEKLLDAGMNVARLNFSHGTHESHGRTIAILKELREKRQVPLAIMLDTKGPEIRLGQVESPIKVQPGDRLTLVSKEILGSKESGVTLYPSCVFPYVRERAPVLIDDGYIQAVVVNAQEHMVEIEFQNSGEIKSNKSLSIKDIDVALPFMTEKDIADLKFGVEQELDLIAASFVRCNEDIDSMRKVLESFGRPNMPIIAKIENHLGVQNFQEIARAADGIMIARGDLGIELSIVEVPGLQKFMARASRETGRFCITATQMLESMIRNPLPTRAEVSDVANAIYDGTSAVMLSGETALGAHPVHAVKTMRSIIQETEKTFDYHAFFQLNDKNSALKVSPYLEAIGFSGIQIAEKASAKAIIVYTQTGGSPMFLSKYRPYLPIIAVTPNRNVYYRLAVEWGVYPMLTLESNRTVWRHQACVYGVEKGILSNYDKILVFSRGAGMQDTNNLTLTTVHDVLSPSLDEIVP

SEQ ID NO: 2344 - protein, 347 aa, Synechocystis sp.
MTVSEIHIPNSLLDRDCTTLSRHVLQQLNSFGADAQDLSAIMNRIALAGKLIARRLSRAGLMADVLGFTGETNVQGESVKKMDVFANDVFISVFKQSGLVCRLASEEMEKPYYIPENCPIGRYTLLYDPIDGSSNVDINLNVGSIFAIRQQEGDDLDGSASDLLANGDKQIAAGYILYGPSTILVYSLGSGVHSFILDPSLGEFILAQENIRIPNHGPIYSTNEGNFWQWDEALRDYTRYVHRHEGYTARYSGALVGDIHRILMQGGVFLYPGTEKNPDGKLRLLYETAPLAFLVEQAGGRASDGQKRLLDLIPSKLHQRTPAIIGSAEDVKLVESFISDHKQRQGN

SEQ ID NO: 2345 - protein, 415 aa, Spinacia oleracea
MASIGPATTTAVKLRSSIFNPQSSTLSPSQQCITFTKSLHSFPTATRHNVASGVRCMAAVGEAATETKARTRSKYEIETLTGWLLKQEMAGVIDAELTIVLSSISLACKQIASLVQRAGISNLTGIQGAVNIQGEDQKKLDVVSNEVFSSCLRSSGRTGIIASEEEDVPVAVEESYSGNYIVVFDPLDGSSNIDAAVSTGSIFGIYSPNDECIVDSDHDDESQLSAEEQRCVVNVCQPGDNLLAAGYCMYSSSVIFVLTIGKGVYAFTLDPMYGEFVLTSEKIQIPKAGKIYSFNEGNYKMWDDKLKKYMDDLKEPGESQKPYSSRYIGSLVGDFHRTLLYGGIYGYPRDAKSKNGKLRLLYECAPMSFIVEQAGGKGSDGHQRILDIQPTEIHQRVPLYIGSVEEVEKLEKYLA

SEQ ID NO: 2346 - protein, 411 aa, Brassica napus
MAATAGATPSSHLLLSSSRHVAASPQPRILFPSLSGKRVAVGKNHHATGVRCMAVAADATAETKPAAKKKSGYELQTLTSWLLRQEMKGEIDTELTIVMSSIAMACKQIASLVQRAGISNLTGVQGAVNIQGEDQKKLDVVSNEVFSNCLRSSGRTGIIASEEEDVPVAVEESYSGNYVVVFDPLDGSSNIDAAVSTGSIFGIYSPNDECLPDSDDTSALGSEEERCIVNVCQPGNNLLAAGYCMYSSSVIFVLTLGKGVFAFTLDPMYGEFVLTQENIEIPKAGKIYSFNEGNYQMWDENLKKYIDDLKDPGPSGKPYSARYIGSLVGDFHRTLLYGGIYGYPRDAKSKNGKLRLLYECAPMSFIVEQAGGKGSDGHHRVLDIQPTEIHQRVPLYIGSKEEVEKLEKYLA

SEQ ID NO: 2347 - protein, 407 aa, Pisum sativum
MAAATASSQLIFSKPYSPSRLCPFQLCVFDAKSVLSSSRRKHVNGSGVRCMAVKEATSETKKRSGYEIITLTSWLLQQEQKGIIDAELTIVLSSISMACKQIASLVQRANISNLTGTQGAVNIQGEDQKKLDVISNEVFSNCLRSSGRTGIIASEEEDVAVAVEESYSGNYIVVFDPLDGSSNLDAAVSTGSIFGIYSPNDECLPDFGDDSDDNTLGTEEQRCIVNVCQPGSNLLAAGYCMYSSSVAFVLTIGKGVFVFTLDPLYGEFVLTQENLQIPKSGEIYSFNEGNYKLWDENLKKYIDDLKEPGPSGKPYSARYIGSLVGDFHRTLLYGGIYGYPRDKKSKNGKLRLLYECAPMSFIVEQAGGKGSDGHQRVLDIQPTEIHQRVPLYIGSTEEVEKVEKYLA

SEQ ID NO: 2348 - protein, 496 aa, Medicago sativa
MATSNKNMLLNYVPVYVMLPLGVINVNNVFEDPDGLKEQLVQLRAAGVDGVMIDVWWGIIEQKGPKEYDWSAYKSLFQLVQKCGLKLQAIMSFHQCGGNVGDVVNIPLPKWVLDIGESDPDIFYTNRSGIRNQEYLSIGVDNKPIFHGRTAIEIYSDYMKSFRENMSDLLKSEVIIDIEVGLGPAGELRYPSYPQNQGWQFPGIGEFQCYDKYLRESFKAAAAKAGHSEWELPDDAGTYNDVPESTEFFKTNGTYLTEKGKFFLTWYSNQLLNHGDQILDEANKAFLGCKVKLAIKVSGIHWWYKAPNHAAELTAGYYNLDDRDGYRPIAKIVSRHHAILNFTCLEMRDSEQSSDAHSSPQKLVQQVLSGGWRENIEVAGENALSRYDATAYNQIILNARPQGVNKDGPPKLRMYGVTYLRLSDDLMQQSNFDIFKKFVVKMHADQDYCSDPEKYNHGIPPLKRSGPKIPDDVLNEATKPIPPFPWDSETDMKVDG

SEQ ID NO: 2349 - protein, 496 aa, Trifolium repens
MATSNKNMLLNYVPVYVMLPLGVINVNNVFEDPDGLKEQLVQLRAAGVDGVMVDVWWGIIEQKGPKEYDWSAYKSLFQLVQECGLKLQAIMSFHQCGGNVGDVVTIPIPQWVLDIGESDPDIFYTNRSGTRDKEYLTVGVDNKPIFHGRTAIEIYSDYMKSFRENMSEFLKSELIIDIEVGLGPAGELRYPSYPQNQGWVFPGIGEFQCYDKYLKADFKAAAAKAGHSEWELPDDAGTYNDIPESTEFFKTNGTYLTEKGKFFLTWYSNQLLNHGDQILDEANKAFLGCKVKLAIKVSGIHWWYKAQNHAAELTAGYYNLDDRDGYRPIAKMVSRHHGILNFTCLEMRDSEQSSDAQSAPQELVQQVLSGGWRENIEVAGENALSRYDATAYNQIILNARPQGVNKDGPPKLRMYGVTYLRLSDDLLQESNFEIFKKFVVKMHADQSHCDDPQEYNHAIPPLKRSGPNIPVDDLLEATKPILPFPWDSETDMKVDG

SEQ ID NO: 2350 - protein, 496 aa, Vigna unguiculata
MASLDKNMLLNYVPVYVMLPLGVVSVNNVFEDPEGLKEQLVQLREAGVDGVMVDVWWGIIEQKGPKQYDWSAYKSLFQLVQECGLKLQAIMSFHQCGGNVGDVVNIPIPQWVLDIGESDPDIFYTNRSGTRDKEYLTIGVDNKPIFHGRTAIEVYSDYMKSFRENMSDFLKSEVIIDIEVGLGPAGELRYPSYPQNQGWVFPGIGEFQCYDKYLKAEFKAAAARAGHSEWELPDDAGTYNDVPESTEFFKTNGTYLTEKGKFFLTWYSNQLLNHGDEILDEANKAFLGCKVNLAIKVSGIHWWYKAQNHAAELTAGYYNLDDRDGYRPIAKMVSRHHASLNFTCLEMRDSEQSSDAQSGPQELVQQVLSGGWRENIEVAGENALSRYDATAYNQIILNARPQGVNKDGPPKHRMYGVTYLRLSDELLQQSNFDIFKKFVVKMHADQDYCEDPQEYNHGIPPLKRSEPKIPVDVLNEATKPIPPFPWDSETDMKVDG

SEQ ID NO: 2351 - protein, 483 aa, Arabidopsis thaliana
MKFTHEKTFTPEGETLEKWEKLHVLSYPHSKNDASVPVFVMLPLDTVTMSGHLNKPRAMNASLMALKGAGVEGVMVDAWWGLVEKDGPMNYNWEGYAELIQMVQKHGLKLQVVMSFHQCGGNVGDSCSIPLPPWVLEEISKNPDLVYTDKSGRRNPEYISLGCDSVPVLRGRTPIQVYSDFMRSFRERFEGYIGGVIAEIQVGMGPCGELRYPSYPESNGTWRFPGIGEFQCYDKYMKSSLQAYAESIGKTNWGTSGPHDAGEYKNLPEDTEFFRRDGTWNSEYGKFFMEWYSGKLLEHRRKLSGKVAGIHWHYNTRSHAAELTAGYYNTRNHDGYLPIAKMFNKHGVVLNFTCMEMKDGEQPEHANCSPEGLVKQVQNATRQAGTELAGENALERYDSSAFGQVVATNRSDSGNGLTAFTYLRMNKRLFEGQNWQQLVEFVKNMKEGGHGRRLSKEDTTGSDLYVGFVKGKIAENVEEAALV

SEQ ID NO: 2352 - protein, 585 aa, Desulfurococcus mobilis
  misc_feature (17)..(17): Xaa can be any naturally occurring amino acid
MGRIIRVTGPLVVADGXKGSKMYEVVRVGEMGLIGEIIRLEGDKAVIQVYEETAGIRPGEPVEGTGSSLSVELGPGLLTSMYDGIQRPLEKLRELSGDFIARGLTAPALPRDKKWHFTPTVKVGDKVTGGDILGVVPETSIIEHKILVPPWVEGEIVEIAEEGDYTVEEVIAKVKKPDGSIEELKMYHKWPVRVKRPYKNKLPPEVPLITGQRTIDTFFSIAKGGTAAIPGPFGSGKTVTQHQLAKWSDAQVVVYIGCGERGNEMTDVLEEFPKLKDPKTGKPLMERTVLIANTSNMPVAAREASIYTGITIAEYFRDQGYDVALMADSTSRWAEALREISGRLEEMPGEEGYPAYLASKIAEFYERAGRVVTLGSEPRVGSVSVIGAVSPPGGDFSEPVVQNTLRVVKVFWALDADLARRRHFPAINWLRSYSLYLDSIQDWWHKNVDPEWRKMRDTAMALLQKEAELQEIVRIVGPDALPDREKAILIVTRMLREDYLQQDAFDEVDTYCPPKKQVTMMRVILNFYERTMEAVDRGVPVDEIAKLPVREKIGRMKFEPDIEKIRALIDETNEQFEELFKKYGA

SEQ ID NO: 2353 - protein, 607 aa, Arabidopsis thaliana
MDTKIGSIDDCKPTNGDVCSPTNGTVATIHNSVPSSAITINYCDATLGRHLARRLVQAGVTDVFSVPGDFNLTLLDHLMAEPDLNLIGCCNELNAGYAADGYARSRGVGACVVTFTVGGLSVLNAIAGAYSENLPLICIVGGPNSNDYGTNRILHHTIGLPDFSQELRCFQTVTCYQAVVNNLDDAHEQIDKAISTALKESKPVYISVSCNLAAIPHHTFSRDPVPFSLAPRLSNKMGLEAAVEATLEFLNKAVKPVMVGGPKLRVAKACDAFVELADASGYALAMMPSAKGFVPEHHPHFIGTYWGAVSTPFCSEIVESADAYIFAGPIFNDYSSVGYSLLLKKEKAIVVQPDRITVANGPTFGCILMSDFFRELSKRVKRNETAYENYHRIFVPEGKPLKCESREPLRVNTMFQHIQKMLSSETAVIAETGDSWFNCQKLKLPKGCGYEFQMQYGSIGWSVGATLGYAQASPEKRVLAFIGDGSFQVTVQDISTMLRNGQKTIIFLINNGGYTIEVEIHDGPYNVIKNWNYTGLVDAIHNGEGNCWTAKVRYEEELVEAITTATTEKKDCLCFIEVILHKDDTSKELLEWGSRVSAANSRPPNPQ

SEQ ID NO: 2354 - protein, 430 aa, Archaeoglobus fulgidus
MRVYTADVKPEMEGQKVTLYGWVHEVRDLGGLVFILLRDREGIVQITLPRKFVSKQVFKLAKKIRRESVIAVTGEVRREEKAPGGVEIIPESIEVLNEADAPLPLEVTEKVPAELDTRLDHRFMDLRRPRVQAIFRIRHQVMQSVREFLSEEGFIEVHTPKIVSTATEGGTELFPISYFEKEAFLNQSPQLYKQVLMAAGFEKVFEIGPIFRAEEHNTTRHLNEAISIDIEMSFTDHNGVMDVLERLVQRVYEDVAEKCERYLGWLEVSLEIPELPFPRITYDEAREIAARKGEEIPWGEDLSTNALKLVGEEMGGLYFITDWPTESKPFYAMPYEDRPEISKSFDLMHGWLELSSGAQRIHLYDMLVESIKAKGMEPESFGFYLEAFRYGMPPHAGWGLGAERLIMSMLGLKNVREAVLFPRDRHRLVP

SEQ ID NO: 2355 - protein, 553 aa, Hordeum vulgare
MYRVKSESDCEMMHQEDQMDSPVGDDGSSGGGSPHRGGGPPLKKGPWTSAEDAILVDYVKKHGEGNWNAVQKNTGLFRCGKSCRLRWANHLRPNLKKGAFTPEEERLIIQLHSKMGNKWARMAAHLPGRTDNEIKNYWNTRIKRCQRAGLPIYPASVCNQSSNEDQQGSSDFNCGENLSSDLLNGNGLYLPDFTCDNFIANSEALSYAPQLSAVSISSLLGQSFASKNCGFMDQVNQAGMLKQSDPLLPGLSDTINGALSSVDQFSNDSEKLKQALGFDYLHEANSSSKIIAPFGGALTGSHAFLNGTFSTSRTINGPLKMELPSLQDTESDPNSWLKYTVAPAMQPTELVDPYLQSPTATPSVKSECASPRNSGLLEELLHEAQGLRSGKNQQLSVRSSSSSVSTPCDTTVVSPEFDLCQEYWEERLNEYAPFSGNSLTGSTAPMSAASPDVFQLSKISPAQSPSLGSGEQAMEPAYEPGAGDTSSHPENLRPDAFFSGNTADSSVFNNAIAMLLGNDMNTECKPVFGDGIMFDTSVWSNLPHACQMSEEFK

SEQ ID NO: 2356 - protein, 128 aa, Aquifex aeolicus
MATLTIDEIVEAIKNMSVLEVAELVKRLEEEFGVSAAAMVAAAPAAGAAAGAPAQAEEKTEFDVILKSPGKNKIQVIKVVREITGLGLKEAKELVDNAPKPIKEGVPKEEAEQIKKKLEEAGAEVELK

SEQ ID NO: 2357 - protein, 627 aa, Rickettsia prowazekii
MGKVIGIDLGTTNSCVAVMEGKEPKVIDNAEGERTTPSIIAFANSERLVGQPAKRQAVTNPRNTIYAVKRLIGRNFTDPMVRKDQGLVPYNIVKADNGDAWVEADNHKYSPSQISAFILQKMKETAENYLGEKVTQAVITVPAYFNDAQRQATKDAGKIAGLEVLRIINEPTAAALAYGFEKSSSKTIAVYDLGGGTFDVSILEISDGVFEVKSTNGDTFLGGEDFDTRILNHLIEVFKKESGIDLSKDPLALQRLKEAAEKAKKELSSTSTTDINLPYITADSTGPKHLNIKFTRAELEKLVDDLIEKTIEPCRQALKDAGFKPNDIQEVVLVGGMTRMPKVQEAVKKFFGREPHKGVNPDEVVALGAAIQGGVLNKEVTDILLLDVTPLSLGIETLGGVFTRLIDRNTTIPSKKSQVFSTADDNQHAVTIRVFQGEREMAKDNKLLGQFNLEGIPPAPRGVPQIEVTFDIDANGIVHVSAKDKASGKEQKVTIQASGGLSDAEIEQMVKDAEHNADEDKKRKELIETKNAADSLVYSTEKTLREYGDKLSSEEKGTVEEALTSLKAALESEDASLIKEKTGNLTAANMKIGEAMYKTQTENQHSEANTVNNEKVVDADFQDVDKK

SEQ ID NO: 2358 - protein, 635 aa, Treponema pallidum
MGKIIGIDLGTTNSCVAIMEGGEPVVIQNAEGGRTTPSIIGFTSDGGRVVGQPAKNQMVTNPEHTIYSIKRFIGSRFNELTGEAKKVPYKIVPQGDDVRVEVEGKLYSTQEISAFILQKMKKTAEDYLGEAVTEAVITVPAYFNDAQRQATKDAGKIAGLDVKRIINEPTAASLAFGFNKDSKREKIIAVYDLGGGTFDISILELGDGVFEVKSTNGDTHLGGDDFDARIVQWLEQGFKSDTGIDLGNDRMALQRLREAAEKAKIALSSSASTEINLPFITADANGPKHLQRTLSRSEFEKMTDDLFERTKEPCRKALKDAGISADRIDEILLVGGSTRMPKVAHVIKDVFGKEGSKGVNPDEAVAIGAAIQGGILGGDVKDVLLLDVTPLSLGIETMGGVFTPLISRNTTIPTRKSQVFSTAADGQTAVSIHVLQGERGMANQNRTLGNFDLVGIPPAPRGVPQIEVTFDIDANGIVHVSAKDLGTGKEQHIRIESSSGLSESEIDRMVKEAEANAESDKREREKIEARNVADSLIYQTEKTLKEAGDGVNAADRARIDEAIAELKTVLSGDDVASIKAKTEILQQASYKIAEEMYKRQAAAGAAAGKKSDAPSGNEAEGGDVDYEVVKDEDSK

SEQ ID NO: 2359 - protein, 675 aa, Pisum sativum
MAATLLRSLQRRNLSSSSVSAFRSLTGSTKTSYATHKLASLTRPFSSRPAGNDVIGIDLGTTNSCVSVMEGKNPKVIENSEGARTTPSVVAFNQKSELLVGTPAKRQAVTNPTNTLFGTKRLIGRRFDDAQTQKEMKMVPYKIVRAPNGDAWVEANGQQYSPSQIGAFVLTKMKETAEAYLGKTISKAVVTVPAYFNDAQRQATKDAGRIAGLDVQRIINEPTAAALSYGMNNKEGLIAVFDLGGGTFDVSILEISNGVFEVKATNGDTFLGGEDFDNALLDFLVSEFKRTESIDLAKDKLALQRLREAAEKAKIELSSTSQTEINLPFISADASGAKHLNITLTRSKFEALVNNLIERTKAPCKSCLKDANISIKDVDEVLLVGGMTRVPKVQQVVSEIFGKSPSKGVNPDEAVAMGAALQGGILRGDVKELLLLDVTPLSLGIETLGGIFTRLISRNTTIPTKKSQVFSTAADNQTQVGIKVLQGEREMAADNKSLGEFDLVGIPPAPRGLPQIEVTFDIDANGIVTVSAKDKSTGKEQQITIRSSGGLSDDEIDKMVKEAELHAQRDQERKALIDIRNSADTSIYSIEKSLAEYREKIPAEVAKEIEDAVSDLRTAMAGENADDIKAKLDAANKAVSKIGQHMSGGSSGGPSEGGSQGGEQAPEAEYEEVKK

SEQ ID NO: 2360 - protein, 675 aa, Spinacia oleracea
MATALRRCLRPEQFRSFPAFKSLAGNASPSLSSPYMAQRLASLVRPFSSRPAGNDVIGIDLGTTNSCVSVMEGKSAKVIENAEGARTTPSVVAFNPKGELLVGTPAKRQAVTNPTNTIFGTKRLIGRVFSDPQTQKEMKMVPYKIVKAPNGDAWVEANGQQYSPSQVGAFVLTKMKETAEAYLGKTVSKAVVTVPAYFNDAQRQATKDAGKIAGLDVQRIINEPTAAALSYGMTNKEGLIAVFDLGGGTFDVSILEISNGVFEVKATNGDTFLGGEDFDNTLLEFLVSEFKKTEGIDLSSDRLALQRLREAAEKAKIELSSTSQTDISLPFISADSSGAKHLNITLSRSKFESLVGNLIERTRAPCKNCLKDAGVSLNEVDEVLLVGGMTRVPKVQEIVQEIFGKSPSKGVNPDEAVAMGAAIQGGILRGDVKDLLLLDVTPLSLGIETLGGVFTRLINRNTTIPTKKSQVFSTAADNQTQVGIKVLQGEREMASDNKMLGEFELQGIPPAPRGLPQIEVTFDIDANGIVTVSAKDKATNKEQNITIKSSGGLSEHEIEKMVKEAEIHAQKDQERKSLIDARNTADTTIYSVEKSLGEYREKITSEIAKEIEDAVSDLRSAMQNDNLEEIKAKTDAANKAVSKIGEHMSGGQGGSSGGTGTGDQTPEAEYEEAKK

SEQ ID NO: 2361 - protein, 430 aa, Borrelia burgdorferi
MARVKGQKVKECSFCGLSVAELGGNVVISNGVAICPECSKICHNLFKEKLCKPLDSKSNGLPTPKQLKDHLDMYVVGQEDAKKVLSVAVYNHYKRILKNNKYDNGIEIEKSNILLVGPTGSGKTLLAKTLAAEMNVPFAIADATTLTEAGYVGEDVENILLKLIHAAHGDVSLAEKGIIYIDEIDKIAKKNENVSITRDVSGEGVQQALLKIIEGTVANVPPRGGRKHPYEDTIEINTQNILFICGGAFVGLENIVKNRINKSSIGFSAIEKKNIREDTSLKYLEMEDLIKFGLIPEFVGRLPVHSYLEKLNKEDLLRILVDPQNSIVKQYYHMFKMDNVELVFEKDALESIVDEAILKNTGARGLRSILEGLLKDVMFEVPSISKAKKVVVTKESVLNADVNPLILVGNAIKKPWAKELYEINLKYDKK

SEQ ID NO: 2362 - protein, 376 aa, Solanum tuberosum
HIITAVIGSGVLSLAWATAQLGWVAGPTVLLLFFFVTYYTSALLSDCYRTGDPVTGKRNYTYMDAVRANLGGFQVKICGVIQYANLFGVAIGYTIAASISMVAVNRSNCFHKQGHRAACNVSSTPYMIIFGVMEIIFSQIPDFDQISWLSIVAAVMSFTYSTIGLGLGVAQVAETGKIEGSLTGISIGTEVTEMQKIWRSFQALGAIAFAYSYSLILIEIQDTLKSPPAEAKTMKRATLISVAVTTVFYMLCGCFGYAAFGDQSPGNLLTGFGFYNPYWLLDIANVAIVVHLVGAYQVYCQPLFAFVEKTATEWYPDSKIITKEIDVPIPGFKPFKLNLFRLVWRTIFVIITTVISMLMPFFNDVVGILGAFGFWP

SEQ ID NO: 2363 - protein, 340 aa, Aeropyrum pernix
MVDIDSAVEAARRRGARRIVLQLPEGMLQYGLYIAKCFEEMLGGAAQVYLHADPTFGACDLHYGELDTTVRPDLIVHVGHSPYPAELAHEGLEPRGRVVYVRALSKSQLPLDALREAAGLLASRYGVRRVGIATTAQHTHLAEKAAEVLRGEGLEVAVPPGLRPYFGAAQVLGCDYRLARGVRADGFVYVGGGVFHPLGLYLATLKPVVQVDPYRGVSEDLTREGEKLYRSRLYRVSQSIGARRWGIIVGLKSGQYRPWLVEKLARAIESAGGEYLLVASEVTTLSQLVAIDNPWFEAFTVTSCPRLPTDDFWSYEKPVLTPGEAMMALEGRLEPYRFPW

SEQ ID NO: 2364 - protein, 494 aa, Aeropyrum pernix
MIQRVPLCQRGDTQFLTSDSNTGFPGISWFQLGGCIHLGVIDVLAAVGERFPAVRKPERKPTLYRRLAWTGVILVLYFIMSNIPLYGIPPQNIGGQVDLQRIIFASSAGTLMELGIGPIVTASLIIQVLVGAKIIKLDLADPEGRRKFTSAQKVLALAFAALEAVAFTVGGRYWVGTAIEPGPLDYALVSLQLFLGALLVIYFDEVMQKGWGIGSAISLFILAGVAQGVVWSIFGTIPGVAQDYGLVPAIISNPDLTLLARPNGFPDLTGFFTTLAAIILLVYLQAMRVEIPITSERFKGIRSRVPLQFIYVTNIPILLVGILVSDLLLVQRLLADYLGVESRAYQIYSSIVYYLSPPRGVVQSIADPVKTAVFIASWTVLSIVFGYMWVEIAGLNPREQAERLIKGGLAIPGMRSDPRVLERVLRRYIYPLTFLSSLIVAALVIVADIFGAYGTGTGLLLAVGIINQYYAMITRERALETYPLLRRILGEEVV

SEQ ID NO: 2365 - protein, 329 aa, Spinacia oleracea
MANKSLFLSLLILAISPLCFSEKSQGGNLYPQFYDHSCPKLEDIVWSVLAKVVAKEPRMAASLLRLHFHDCFVKGCDGGVLLDSSGSIVSEKRSNPNRNSARGFEVIDEIKAAVEKACPETVSCADILALTARDSTLLVGGPNWEVPLGRRDSLDASLSGSNYNIPAPNNTFQTILTKFKLKGLDLVDLVALSGSHTIGDARCTSFSKGYTTRAETTTRQTLNPAMAAVLRKRCPRSGGDQNLFNLDHVTPFKFDNSYYKNLLANKGLLSSDEILVSQNADSMKLVKQYAENNHLFFQHFAQSMVKMGNIAPLTGSRGEIRRVCRRVNH

SEQ ID NO: 2366 - protein, 337 aa, Spinacia oleracea
MVKSMGYFVLVALLALAPLCLSHKIHGGGGRGGYLHPQFYDHSCPQLHQIIKSVVAQAVSRDRRMAASLLRLHFHDCFVKGCDASLLLDNGGGIVSEKGSNPNRNSVRGFEVIDAIKAAVEKACPHTVSCADIFAVVARDSTVIAGGPNWEVPLGRRDSRGATLSGSNNDIPAPNNTFNTILTKFKRQGLDLIDLVALSGAHTIGNARCVSFRQRLYNQNRNGQPDFTLDQVYAFKLRNQCPRSGGDQNLFFLDYVSPFSFDNSYYRNILANKGLLNSDQVLLTKNHASMQLVKQYAENMELFFDHFSKSIVKMGNISPLTGMQGEIRQNCRRINAY

SEQ ID NO: 2367 - protein, 334 aa, Spinacia oleracea
MVKSMSYCIVLVVLLALSPLCFCHKVVQGGYLYPQFYDHSCPQAQQIVKSVVAQAVSRDRRMAASLLRLHFHDCFVKGCDASVLLDNSGSIVSEKGSKPNKNSIRGFEVIDEIKAELERACPHTVSCADILAIAARDSTVISGGPNWEVPLGRKDSRGASLSGSNNDIPAPNNTFNTILTKFKRQGLNLVDLVALSGAHTIGNARCVSFKQRLYNQNQNGQPDPTLNALYASQLRNQCPRSGGDQNLFFLDHESPFNFDNSYYRNILANKGLLNSDQVLLTKNHKSMKLVKQYAENVELFFDHFAKSVVKMGNISPLTGMKGEIRANCRRINAY

SEQ ID NO: 2368 - protein, 817 aa, Synechocystis sp.
MSLLVQKPEIPACAWQRSIGKDWEKPYTVRYASNLDDGPDHGMPLGGFGAGCIGRSPTGKFNLWHLDGGNHIFKNLPACQFSVYEQVAGEEAKAYAMATEAPEDGSLDRWQWYPKEKGEYSALYPRSWYEYKDVFKSELICEQFSPVWGGNYQESSYPLAVFDWTVHNPTDKPITLSIMLTWQNSVGWFTNAIKSPTVKLRDDGSPEYEYQPRWGDSTGNFNQWIQDGFRVGCLFNRVQPHEALREGEGQMCIASVSNPSVEVFYHNRWNPSGDGADVWDWFAGNGSLPDIQDETAAEPGEQIAGAICLRFTVRPGKTKKIPFLLAWDLPITEFAQGVTYYRRYTDFYGRNGKNVWSMIRTALKHSDTWRKKIEAWQAPILENPRLPDWLKMSLFNELYLLTQGGTLWTAATENDPVGQFGVCECMDYRWYESLDVRLYGSFGLLMHWPKLEQAVMLAFARAIPTEDPKERVIGYNLSLAPRKVKNATPHDLGAPNEHPWERSNYTAYQDCNLWKDLGSDFVLLVYRDFLLLPDADGEFLGECWPSIVAALDYLKGFDLDNDGIPENSGAPDQTFDDWRLQGISAYCGGLWIAALEAALVMGQYLLENPPQQTDLDAMEIQTAIARYETWLAQARSLYQDTLWNGEYYNLDSQSGSKVVMADQLCGQFYARLLNLPDVVEHHYAEKALAKVYDTCFLKFAHGELGAANGLLPDGSPQNPNDTHPLEVWTGINFGLAAFLIQMGMKEEALKMTETVVNQVYNNGLQFRTPEAITAVGTFRASHYLRAMAIWAVYGLLEGFSNLPIAPADDEVPTSDFY

SEQ ID NO: 2369 - protein, 435 aa, Deinococcus radiodurans
MTSPLKRTLTRELPQHEGQTVKLQGFVHARRDLGGVQFLVLRDVTGVTQCVGSGLTLPLAESSVEVVGKVKAHPKAPGGFEVQVEDFRVISAATEATPVEIPKMEWNVNPETMLDYRVVTVRGLKERAALKVQAELVDAFRAHLRGEGFTEISTPKIVSAGAEGGANLFPIDYFGHPAYLAQSPQLYKQIMVGVFERVFEVAAVYRAEEHATSRHLNEYLSLDVEMGFIEDEEDVMGLENRLLASIMERLRATSQAEFELLGATIPDVPAHIPRITLMDARQLVTEKYGHPVGGKDLDPEAERLLSQHFAETEGSDFVFVTKYPRAARPFYAHPELNEDGSVNGEVTRGFDLLFRGIEITSGGQRIHDYGMLMDSIAAYKLKPESLEGYTEVFKYGMPPHGGFAIGAERLTAKLLGIANVRYARAFPRDRHRLTP

SEQ ID NO: 2370 - protein, 367 aa, Arabidopsis thaliana
MATSMIQRMFKQGTKIVCVGRNYAAHAKELGNAVPKEPVIFLKPTSSYLENGGTIEIPHPLDSLHHEVELALVIGQKARDVPESIAMDYIGGYAVALDMTARELQASAKASGLPWTVAKGQDTFTPISSVLPKAMVRDPDNLELWLKVDGETRQKGLTKDMIFKVPYLISYISSIMTLYGDVILTDCIFICFESFCFFISIVSRSRKMSEKGGKGLKSSLKSKDGGKDGSSTKLKKGTPPANYKILNVSSDQQPFQSSAAKCGKSDKPTKSSKNSLHSFELKDLMTEHWLMLRVVFTTQTLNLSEKSLSILLAVLRLHWIRFVSHSMCVIANASSESVDEVLAFIPSLKVRPLELPESDSDVCVVIL

SEQ ID NO: 2371 - protein, 1074 aa, Arabidopsis thaliana
MADSRNGNARAPPSGVPPKAGNTYSIDVKNFISRARALYEHWKKHSADLWGSADALAIATPPASDDLRYLKSSALNIWLLGYEFPDTIMVFTKKQIHFLCSRNKASLLEVVKKPAHDELKLDVIMHVKPKGDDGTGLMDAIFRAIRDLSRGDGNDSQVVGHIAREAPEGKLLETWTERLKNANFQFVDITGGLSDLFAVKDDTEVMSVKKAAYLAYSVMKNVVVPNLESAIDEEKDVTHSALMDLTEKAILEPTKASVKLKPENVDICYPPIFQSGGKFDLKPSAASNDELLTYDPASIIICAVGARYNSYCSNVARTYLIDATSLQSKAYEVLLKAHEAAIDALRSGRKINTVYQAALSVVEKNAPEFVDKLTKSAGTGIGLEFRESGLNINAKNDKVLRPKMAFNVSLGFQNLECESESRSKNKKFSLLLADTVLVTDQKPELLTKCSKSVKDVAYSFKEDEEEEKPRKKARTSGSENYITKTALRSDDHVVSKEELRKQHQAELARQKNEETARRLAGDSSGAGDSRSTAKTSADVVAYKNVNDMPHKELMIQVDTRNEAVLLPIYGSLVPFHVATIRTVSGNQDTNRNCYIRIIFNVPGTPFNPHDSNSLKNQGAIYLKEVSFRTKDSRHSSEVTQQIKTLRRQVMARESERAERATLVTQEKLQLAGNKFKPLRLSELWIRPPFSGRKKIPGTLEAHANGFRYSTTRPDERVDVLFANIKHAFFQPAEKEMITLLHFHLHNHIMVGTKKTKDVQFYVEVMDVVQSLGGGRRSAYDPDEIDEEQRERDRKNKINMDFNHFANRVNDMWQLPQFASLDLEFDQPLRELGFHGVPHKTSAFIIPTSSCLVELIEYPFLVVSLSEIEIVNLERVGFGQKNFDMAIIFKDFKKDVLRVDSVPTSSLEGIKEWLDTTDIKYYESKLNLNWRQILKTITDDPQSFIDDGGWEFLNLDGSDSESGGSEESDKGYEPSDVEVESESEDEASESESLVESDDDEEEDSEQESEEEKGKTWDELEREATNADREHGVESDSEEERKRRKMKAFGKSRPGTSGGGGSSSMKNMPPSKRKHR

SEQ ID NO: 2372 - protein, 1791 aa, Arabidopsis thaliana
MILYQVDDDDVVNCDDDDVMIGGLFNFEFAEDYTEEQATAHIRRLLDIVACTTAFGPSKPPVSRTLPKDSEKKESGSTDGDSPTEKDAGDSNSGLSPKPKESEKKSVGACEAQSAEGAAKSDIDMCPPTRLGQFYEFFSFSYLTPPIQCEFPYSLVNRILRLILLIDSDKIIFRHQKIKVSSGKPFTVVASRTGFYPPGKQQLLCHSLVELLQQISRPFDAAYDALMKAFIEHNKFGNLPYGFRANTWVVPPVVADSPSTFPSLPVEDETWGGDGGGVGRSGKYDKRKWAKEFAILAAMPCKTPEERQVRDRKAFLLHSLFVDVSVFKAVEIIKKIVENNQCSLKDPAALGFHEERIGDLIVRVARDDPDASAKLDRKSDGTQVLEISQEELAQRNLLKGITADESATVHVILLASAAFLSFALTGIVTEIYLDHIGYVYFGGGGSIVKVASEFKLNDGHILQDIDIEDQSEGGANALNVNSLRTLLHKSSTPSSLAQRSPNADSEQIRVAKSLVRKVIEDSLKKLEIEPSRYSKPIRWELGACWVQHLQNQASSKSESKKTEDPKPEPAVKGLGKQGALLKEIKRKIDVKANKTEQGKEAPANDTDNTSETEDQKELEKQNEEIEKMWKELVTETAYQRLKESETGFHLKSPKELIEMARKYYTDTALPKLGKSSVPHKFRLDMLQVADFGSLELSPVDGRTLTDFMHTRGLQMHSLGRVVELAEKLPHVQSLCVHEMIVRAYKHILQAVVAAVENTADVATSIATCLNVLLGTPSDTESVYDEKIKWTWVETFISKRFGWDWKHEGCQELRKFSILRGLSHKVGLELVPKDYEMDTSYPFKKFDIISMVPVYKHVACSSADGRTLLESSKTSLDKGKLEDAVNYGTKALAKLVAVCGPYHRMTAGAYSLLAVVLYHTGDFNQATIYQQKALDINERELGLDHPDTMKSYGDLAVFYYRLQHTELALKYVNRALYLLHLTCGPSHPNTAATYINVAMMEEGMKNAHVALRYLHEALKCNQRLLGADHIQTAASYHAIAIALSLMDAYSLSVQHEQTTLQILQAKLGPEDLRTQDAAAWLEYFESKALEQQEAARNGTPKPDASISSKGHLSVSDLLDYITPDSGIKARDAQRKARPKVKGKPGQSPGPVSEENQKDDEILSPAHLTGESSSDKENKSETKSEEKKVENFDLEQSKPQDQLKLVKPEATVHEDDDSDEGWQEAVPKNRFSSGRRTRPSLAKLNTNFMNVTQQPSRSRGKSTNFTSPRTSSNELSISVAGSTSSPASKMFVKSPLNKKQNNSSVVGERPVNDKSALASSACTEQINKPTPMLSPVSVKAGKLFSYKEVALAPPGTIVKIVAEQLPEETKAPQNLDAAKIAVDGPEKVNAQDAESENKHVATETEAENTDCNEQGRVVVGGSELTSSPKEIKNVEVEKAAEKAFPIETAVSNARPGKSKSAQMAEDSDTCLLNKSPTANDSNGSESVIGVKLQKDLCDAELKTVDGETENLPNGDSSPKSSVAADGEKQDACEAQKEMSKKLSASAPPYTPTTIPIFGSIAVPGFKDHGGILPSPLNMPPMLPINHVRRSTPHQSVTARVPYGPRLSGGGYNRSGNRVPRNKPSFPNSTESNGEANQFNGPRIMNPHAAEFIPSQPWVSNGYPVSPNGYLASPNGAEITQNGYPLSPVAGGYPCNMSVTQPQDGLVSEELPGAGSSEEKSGSEEESNNDKNAGEDDEAVGQETTDTPENGHSTVGEVETTSHETCDEKNGERQGGKCWGDYSDNEIEQIEVTS

SEQ ID NO: 2373 - protein, 960 aa, Arabidopsis thaliana
MSPAAVEIGSPVEKVSSVLNPMENFSAFFPESVHSHDQRTMGSSFSFGFGAGSGQTTKTRHKPRLVKLRKNGREVKKPSFSGEILSGFNPFAPPGSLHMNSGNDRDAGQSPGDKCFVFGASGNSSGAKSSPGNATIASLSDEEEFSTPIGDSELDSESIKEHSNGVRGKVDNDRENIRPCSESTIFDATNGFRFDGGVNGSWKSVENPDAVKEFFRRQNGMDKASASKSCSKSNSVQYAHGKNRDDPELNLLADMEKLNISDSRVHGGSDYEEASKSNKTPVFTFSSFGKVDPICKEGAATSEPYSFSSNGFQQSNNASGENPTFHSQTTYGNNLTNTSFATKTFFDDFKVPEWDPSLLKDSLFPEVDRNPVHARSNRSSKDKRSKKVKEKMKQGEPDRCNGQTAEGIEAQEKLNSPGYCSPMDYSPYQGDKTSNQFPTETPLAPSHSREHIDSRSSNDFKVASARDSSLFTAEDHGSTCIPNFSFSASTSQETIRHKKLQAVKKYRRKVNNSLPKSNLNATMRNNQENQPVNTGQAKQDSGSTSMMPDVCEVWRLRGNQAYKNGYMSKAEECYTHGINSSPSKDNSEYSVKPLALCYGNRAAARISLGRLREAISDCEMAASLDPSYIKAYMRAANCHLVLGELGSAVQYFNKCMKSTSSVCLDRRTTIEAAEGLQQAQRVADFTSCASIFLEKRTPDGASDALVPIANALSISSCSDKLLQMKAEALFMNAGNEAVRDRKYMEAVEQYTAALSRNVDSRPFAAICFCNRAAANQALVQIADAIADCSLAMALDENYTKAVSRRATLHEMIRDYDQAASDLQRLISILVKQSDKTKTPETSVDRASSRKELKQARQRLSVMEEKSKEGIHLDFFLIMGVKTSDSAADIKKAYRKAALRHHPDKAAQILVRSESEGPWLKEILEEVHKGADRLFKMIGEAYSVLSDPTKVWFLAYYAVKP

SEQ ID NO: 2374 - protein, 290 aa, Arabidopsis thaliana
ISRYKLIKEVGDGTFGSVWRAINKQTGEVVAIKKMKKKYYSWDECINLREVKSLRRMNHPNIVKLKEVIRENDILYFVFEYMECNLYQLMKDRQKLFAEADIKNWCFQVFQGLSYMHQRGYFHRDLKPENLLVSKDIIKIADFGLAREVNSSPPFTEYVSTRWYRAPEVLLQSYVYTSKVDMWAMGAIMAELLSLRPIFPGASEADEIYKICSVIGTPTEETWLEGLNLANTINYQFPQLPGVPLSSLMPSASEDAINLIERLCSWDPSSRPTAAEVLQHPFFQVHLESF

SEQ ID NO: 2375 - protein, 130 aa, Lycopersicon esculentum
IPSRNNTSGHHHHVHRGHRHRHVHHRRSIYHHHGRHHHHQGIYHHRHLSTSLLHHHHHHPHLHTTTNHHHHHPHHLHLPITTSLLHHHRHLLLYLLLQATTIAISSSTILLQVSSTTITITPTSTCLQVQ

SEQ ID NO: 2376 - protein, 891 aa, Schizosaccharomyces pombe
MGRQFICSIYLPYTINFHLDELEGNHESHPAITHQEKVTQTHRDSVKIDDILTRLSISKSESGQATPVLTPQLEGMNDYFSLGPSKRTGGSMTPGLGAMSPIPGSGRSSPLYTQPRSRATSPSRVRQADRFAAPGIGAGALPIRRKRRDSLAKSVALFESARWSVERGVVGNSGLFHAVDAAVRDHGLQNPLWVGLLGMPTESLSEKTKNAISGALLVKHQSLVVYTSDSNFEGHYNHYCRKILWPSLHYQHNEIFSFFHEESNWDDYVAVNRAFADALIKNYKTGDTIWVNDYHLLLVPNMVRERIPSAIIGLFIHVSFPSSEVFRCFARRKELLQGMLGSNLIGFQTEEYKRHFLQSCSRVLYAESTFDRILLDDRYIDVYAHPIGADPVLVDKWLENPETLEVKEVLEKRYANLNIFVGCDKMDPIRGIREKLLAFEQFLYDNPEYQKNTILIQTSTFTEEQKEYGVAISDIVTRINSAFGDFSLDHLPVTILSSDLSYPQYLALLSVADAFIVTSLREGMSLTCHEFILTQRQKKSPLIVSEFIGCASMFSNGAFIVNPWSTLELSLSMKKALTLSTNERNQRYSNCLDVVLTHSASNWVTGFETKLKKSWTSQQKRDFSRLPRFTLNFIGNRYDHAKKRLLILNFDGNAVTWEGRHEFVDFHYGYMVSILSKLIADDRNIVYIASCLEEDELESLFMHVPGVGLIAENGCYVLPHYAENVHQSWIRLYKKQQMDWREPLHDIIQYYSERTPGSSLIDHGFAMEFNYVKAENRENGLRSAGELASSINETQHGCRAVPLDGRVLCEPTTISKATAANYIMTHLIKNPEELDLILVAGNNRTDESVFAWANKSKVSSFTVSMGVGNTEAKAYTDGIPSFFNVLNSLCA

SEQ ID NO: 2377 - protein, 384 aa, Schizosaccharomyces pombe
MVLPQNVNNNAPTSGRTCQKPTSAFFYEIMSDSKLADSLNCLSVSTPSTTANPGRQQLLRLAVSNQRQVNNVSLANGKENKRTSNSKFNSSLRKIEEPIAGVPSSAGPQWREFHIGMFEIGKPLGKGKFGRVYLAKEKKTGFIVALKTLHKSELVQSKIEKQVRREIEIQSNLRHKNILRLYGHFHDEKRIYLILEFAGRGELYQHLRRAKRFSEEVASKYIFQMANALSYLHKKHVIHRDIKPENILLGIDGEIKLSDFGWSVHAPSNRRTTLCGTLDYLPPEMVEGKEHTEKVDLWSLGVLTYEFLVGAPPFEDMSGHSATYKRIAKVDLKIPSFVPPDARDLISRLLQHNPEKRMSLEQVMRHPWIVKYKDSWTRKSSESS

SEQ ID NO: 2378 - protein, 1109 aa, Ipomoea nil
MKVAVNTFLLSLCSTSSIYAAFALNSDGAALLSLTRHWTPIPSDITQSWNASDSTPCSWLGVECDRRQFVDTLNLSSYGISGEFGPEISHLKHLKKVVLSGNGFFGSIPSQLGNCSLLEHIDLSSNSFTGNIPDTLGALQNLRNLSLFFNSLIGPFPESLLSIPHLETVYFTGNGLNGSIPSNIGNMSELTTLWLDDNQFSGPVPSSLGNITTLQELYLNDNNLVGTLPVTLNNLENLVYLDVRNNSLVGAIPLDFVSCKQIDTISLSNNQFTGGLPPGLGNCTSLREFGAFSCALSGPIPSCFGQLTKLDTLYLAGNHFSGRIPPELGKCKSMIDLQLQQNQLEGEIPGELGMLSQLQYLHLYTNNLSGEVPLSIWKIQSLQSLQLYQNNLSGELPVDMTELKQLVSLALYENHFTGVIPQDLGANSSLEVLDLTRNMFTGHIPPNLCSQKKLKRLLLGYNYLEGSVPSDLGGCSTLERLILEENNLRGGLPDFVEKQNLLFFDLSGNNFTGPIPPSLGNLKNVTAIYLSSNQLSGSIPPELGSLVKLEHLNLSHNILKGILPSELSNCHKLSELDASHNLLNGSIPSTLGSLTELTKLSLGENSFSGGIPTSLFQSNKLLNLQLGGNLLAGDIPPVGALQALRSLNLSSNKLNGQLPIDLGKLKMLEELDVSHNNLSGTLRVLSTIQSLTFINISHNLFSGPVPPSLTKFLNSSPTSFSGNSDLCINCPADGLACPESSILRPCNMQSNTGKGGLSTLGIAMIVLGALLFIICLFLFSAFLFLHCKKSVQEIAISAQEGDGSLLNKVLEATENLNDKYVIGKGAHGTIYKATLSPDKVYAVKKLVFTGIKNGSVSMVREIETIGKVRHRNLIKLEEFWLRKEYGLILYTYMENGSLHDILHETNPPKPLDWSTRHNIAVGTAHGLAYLHFDCDPAIVHRDIKPMNILLDSDLEPHISDFGIAKLLDQSATSIPSNTVQGTIGYMAPENAFTTVKSRESDVYSYGVVLLELITRKKALDPSFNGETDIVGWVRSVWTQTGEIQKIVDPSLLDELIDSSVMEQVTEALSLALRCAEKEVDKRPTMRDVVKQLTRWSIRSYSSSVRNKSK

SEQ ID NO: 2379 - protein, 602 aa, Arabidopsis thaliana
MLSVKRCIKILKLWHLLPEITPSLRQNISGYNIFDWKGRVRSRSKKRSSSTPPRLITSQNCVKGKNIEIVPSTVLVEAGQSYAKGSAWVKKSTTGVARSPVKPPESHLPESVLVSAIPSEDSFPYPPGWGAMSSKSRKRWRHKWNISRSSAADHISKILVGDFDQIAATSDHYSVLQTSIPMRGLEEFQNCLRDSDLVDIPSRGVHYTWSNHQDDNPIIRKLDRAIANGDWFSSFPSAIAVFELSGVSDHSPCIIILENLPKRSKKCFRYFSFLSTHPTFLVSLTVAWEEQIPVGSHMFSLGEHLKAAKKCCKLLNRQGFGNIQHKTKEALDSLESIQSQLLTNPSDSLFRVEHVARKKWNFFAAALESFYRQKSRIKWLQDGDANTRFFHKVILANQAKNLIKFLRMDDDVRVENVTQVKEMIVAYYTHLLGSDSDILTPDSVQRIKDIHPFRCNDTLASRLSALPSDKEITAAVFAMPRNKAPGPDSFTAEFFWESWFVVKDSTIAAVKEFFRTGHLLKRPSGAHVKNKEPTRPRHSAGGRVVHLRMKRSHSTKLLGLGPSCMTKTKPLGFSTRPRAERSCADLSILSYSQLGQPRIAYK

SEQ ID NO: 2380 - protein, 514 aa, Arabidopsis thaliana
MASILEPSKSSFFPALTKIVGTLGPKSRSVEALSGCLKAGMSVARFDFSWGDADYHQETLDNLKVAVRSTKKLCAVMLDTVGPELQVINKSEKAITLKADGLVTLTPNQDQEASSEVLPINFNGLAKAVKKGDTIFVGQYLFTGSETTSVWLEVDEVKGDDVICLSRNAATLAGSLFTLHSSQVHIDLPTLTEKDKEVISTWGVQNKIDFLSLSYCRHAEDVRQTREMLKKLGDLSQTQIFAKIENVEGLTHFDEILQEADGIILSRGNLGIDLPPEKVFLFQKAALYKCNMAGKPAVLTRVVDSMTDNLRPTRAEATDVANAVLDGSDAILLGAETLRGLYPVETISTVGRICAEAEKVFNQDLYFKKTVKYVGEPMTHLESIASSAVRAAIKVKASVIICFTSSGRAARLIAKYRPTMPVISVVIPRVKTNQLKWSFSGAFEARQSLIVRGLFPMLADPRHPAESTSATNESVLKVALDHGKHAGVIKSHDRVVVCQKVGDASVVKIIELED

SEQ ID NO: 2381 - protein, 411 aa, Lactococcus lactis
MSNTQNPNIQCSFCGKSQDDVKKMIAGSDVYICNECIELSTRILEEELKEEQDSEMLEVKTPKEMFDHLNEYVIGQEKAKRALAVAVYNHYKRINFTASKIAEDIELQKSNILLIGPTGSGKTFLAQTLAKSLNVPFAIADATSLTEAGYVGEDVENILLKLLQASDFNIERAERGIIYIDEIDKIAKKSENVSITRDVSGEGVQQALLKIIEGTVASVPPQGGRKHPNQEMIQIDTKNILFIVGGAFDGIEEIVKQRLGEKIIGFGANNKKLSDEDSYMQEIIAEDIQKFGLIPEFIGRLPIVAALERLTEEDLIQILTEPKNALIKQYKQLLLFDNVELEFKDGALMAIAKKAIERKTGARGLRSIIEEVMMDIMFEVPSHEEITKVIITEAVVDGKAEPEMIREADKK

SEQ ID NO: 2382 - protein, 423 aa, Salmonella typhimurium
  misc_feature (90)..(90): Xaa can be any naturally occurring amino acid
MTDKRKDGSGKLLYCSFCGKSQHEVRKLIAGPSVYICDECVDLCNDIIREEIKEVAPHRERSALPTPHEIRTHLDDYVIGQEQAKKVLAXAVYNHYKRLRNGDTSNGVELGKSNILLIGPTGSGKTLLAETLARLLDVPFTMADATTLTEAGYVGEDVENIIQKLLQKCDYDVQKAQRGIVYIDEIDKISRKSDNPSITRDVSGEGVQQALLKLIEGTVAAVPPQGGRKHPQQEFLQVDTSKILFICGGAFAGLDKVIANRVETGSGIGFGATVKAKSDKASEGELLSQVEPEDLIKFGLIPEFIGRLPVVATLNELSEEALIQILKEPKNALTKQYQALFNLEGVDLEFRDEALDAIARKAMARKTGARGLRSIVEAALLDTMYDLPSMEDVEKVVIDESVIAGQSKPLLIYGKPEAQASGE

SEQ ID NO: 2383 - protein, 329 aa, Asparagus officinalis
MALSMNLLFLVLIISLSLAHLCFADGSLTPQFYDHSCPRAQQIVKGVVEKAVAKDRRMAASLLRLHFHDCFVKGCDGSVLLDSSGTIVSEKRSNPRRDSARGFEVIDEVKSALEKECPQTVSCADILAVVARDSTVITGGPSWEVPLGRRDSLGASLSGSNYNIPAPNNTLQTIITKFKLKGLDIVDLVTLLGSHTIGDARCTSFRQRLYNQSGNGLPDATLDKTYAAQLRQRCPQSGGDQNLFALDFNTQFKFDNFYYKNLVASEGLLSSDEILFTQSSTTMALVKKYAEDNGAFFEQFAKSMVKMGNVDPLTGKRGEIRKICRRINH

SEQ ID NO: 2384 - protein, 479 aa, Candida albicans
MSGFRVLDLVKPFSPFLPEVIAPERKVQFQQRVMWTIITLLIFLVMSEIPLYGIASSDSSDPLFWLRMMLASNRGTLMELGISPIVSSGMLFQLLQGTKIIHVDMQNKNDRETFQTAQKLLAILLAVGQATVYVLTGMYGPPSSLGVGVCSLLILQLVFASTIVILLDELLQKGYGLGSGVSLFTATNTCEQVFWKAFAPTTSTSAKGTEFDGAVVAMFHLLGSRKDKKRALIESFYRPNLPNMFQLLATLLVFFAVVYLQGFRIELPMKSTRQRGPYGSYPIRLFYTSNIPIMLESALASNIFIISQLLFMRWPNNLFVKLLGTWDARAGSSQLYANGGLAYYIQPPFNFTDALLDPIKTTIYIAFVLGSCAVFSTTWIEISGTSPRDVAKQFKEQGLVIAGHRDTSAYKELKKIIHIAAAFGGATIGALSVVCDLMGTLGSGTSILLAVTTIYGYYELAVKEGGFNKSIVSGFSDGI

SEQ ID NO: 2385 - protein, 122 aa, halophilic eubacterium
ALTQEDIINAVAEMSVMEVAELVSAMEEKFGVSAAAAVVAGPGGGEAEEAEEQTEFDLVLTSAGEKKVNVIKVVREITGLGLKEAKAAVDGAPATLKEGMSKEDGDEAKTKLEEAGASVELK

SEQ ID NO: 2386 - protein, 341 aa, Sporothrix schenckii
MDNYQKLEKVGEGTYGVVYKARDLTAGGRIVALKKIRLEAEDEGVPSTAIREISLLKEMRDPNIVRLYNIVHAEGHKLYLVFEFLDLDLKKYMDSLPVSDGGRGKALPEGTGTRLHTLGLGDDIIKKFMSQLCAGIRYCHSHRILHRDLKPQNLLINKEGNLKLADFGLARAFGVPLRTYTHEVVTLWYRAPEILLGGHQYSTGVDMWSVGCIFAEMAMRKPLFPGDSEIDEIFKIFRLLGTPTEDVWPGVTTYPDFKASFPRWVQDTETPICPTLDPMGQELLELMLVYDPASRLSAKQACNHPYFDDLEKALPGTAAAAARQHTTTAAAGGAYNGSGYH

SEQ ID NO: 2387 - protein, 344 aa, Schizosaccharomyces pombe
DLDEIDTDIVTLSSFILQEQRRYNQKHKNEEGKPCIIQEASGELSLLLNSLQFSFKFIANTIRKAELVNLIGLSGIVNSTGDEQKKLDKICNDIFITAMKSNGCCKLIVSEEEEDLIVVDSNGSYAVTCDPIDGSSNIDAGVSVGTIFGIYKLRPGSQGDISDVLRPGKEMVAAGYTMYGASAHLLLTTGHRVNGFTLDTDIGEFILTHRNMKMPLQHSIYSINEGYTAFWDEKIARFIAHLKESTPDKKPYSARYIGSMVADMHRTILYGGLFAYPCSKGNNGKLRLLYECFPMAFLVEQAGGIAVNDKGDRILDLVPKTLHGKSSIWLGSKHEVEEYINFIK

SEQ ID NO: 2388 - protein, 473 aa, Arabidopsis thaliana
MQALQSSSLRASPPNPLRLPSNRQSHQLITNARPLRRQQRSFISASASTVSAPKRETDPKKRVVITGMGLVSVCGNDVDAYYEKLLSGESGISLIDRFDASKFPTRFGGQIRGFSSEGYIDGKNERRLDDCLKYCIVAGKKALESANLGGDKLNTIDKRKAGVLVGTGMGGLTVFSEGVQNLIEKGHRRISPFFIPYAITNMGSALLAIDLGLMGPNYSISTACATSNYCFYAAANHNHRGEADMMIAGGTEAAIIPIGLGGFVACRALSQRNDDPQTASRPWDKARDGFVMGEGAGVLVMESLEHAMKRGAPIVAEYLGGAVNCDAHHMTDPRADGLGVSSCIERCLEDAGVSPEEVNYINAHATSTLAGDLAEINAIKKVFKSTSGIKINATKSMIGHCLGAAGGLEAIATVKAINTGWLHPSINQFNPEQAVDFDTVPNEKKQHEVDVAISNSFGFGGHNSVVAFSAFKP

SEQ ID NO: 2389 - protein, 359 aa, Hydrogenophilus thermoluteolus
MSWAHTPTLTQYLIEERRRYPQASGDFNALILDMARACKAIARQVAYGALAKSNHAVTTTINVQGEEQKPLDVISNECFMRLTEWGGYLAAMASEEMDEPYLIPEQYPRGRYLLLFDPLDGSSNIDVNVSVGSIFSVLRAPEGKTEITVDDFLQPGTQQVAAGYAIYGPTTMLVLTVGRGVVGFTLDPDFGEFMLTHPNIRIPESTKEFAINTSNARFWEPPVKRYVDECLKGKTGPRGKDFNMRWVASLVAETHRILSRGGVFLYPRDNKEPKKPGRLRLLYECNPIGMIVEQAGGRASTGYGPVLEVQPTELHQRIGFVFGSREEVERIEQYHNDPDASPVDLPLFAERTLFRDETL

SEQ ID NO: 2390 - protein, 768 aa, Saccharomyces cerevisiae
MDFETNEDINGVRFTWNVFPSTRSDANSNVVPVGCLYTPLKEYDELNVAPYNPVVCSGPHCKSILNPYCVIDPRNSSWSCPICNSRNHLPPQYTNLSQENMPLELQSTTIEYITNKPVTVPPIFFFVVDLTSETENLDSLKESIITSLSLLPPNALIGLITYGNVVQLHDLSSETIDRCNVFRGDREYQLEALTEMLTGQKPTGPGGAASHLPNAMNKVTPFSLNRFFLPLEQVEFKLNQLLENLSPDQWSVPAGHRPLRATGSALNIASLLLQGCYKNIPARIILFASGPGTVAPGLIVNSELKDPLRSHHDIDSDHAQHYKKACKFYNQIAQRVAANGHTVDIFAGCYDQIGMSEMKQLTDSTGGVLLLTDAFSTAIFKQSYLRLFAKDEEGYLKMAFNGNMAVKTSKDLKVQGLIGHASAVKKTDANNISESEIGIGATSTWKMASLSPYHSYAIFFEIANTAANSNPMMSAPGSADRPHLAYTQFITTYQHSSGTNRIRVTTVANQLLPFGTPAIAASFDQEAAAVLMARIAVHKAETDDGADVIRWLDRTLIKLCQKYADYNKDDPQSFRLAPNFSLYPQFTYYLRRSQFLSVFNNSPDETAFYRHIFTREDTTNSLIMIQPTLTSFSMEDDPQPVLLDSISVKPNTILLLDTFFFILIYHGEQIAQWRKAGYQDDPQYADFKALLEEPKLEAAELLVDRFPLPRFIDTEAGGSQARFLLSKLNPSDNYQDMARGGSTIVLTDDVSLQNFMTHLQQVAVSGQA

SEQ ID NO: 2391 - protein, 130 aa, Saccharomyces cerevisiae
MHKSIPFEELISLYAVSDVCLVSSTRDGMNLVSYEYIACQEEKKGSLILSEFTGAAQSLNGAIIVNPWNTDDLSDAINEALTLPDVKKEVNWEKLYKYISKYTSAFWGENFVHELYSTSSSSTSSSATKN

SEQ ID NO: 2392 - protein, 740 aa, Oryza sativa
MDCYYKLPVEKLAMRLLLFIGLVISLQFMADGASLPDDRCLKKCGDVDILYPFGIGEGCAIEGFVLSCSKTEDGRGDVALYGTTPVLNISLRYGQVRMKSTYISSMCYNLSTKNMDYKNWLLNLTTSPFTISQKENIFIVIGANTAANMFGYSRYSTCSPYNSFTAQDGSCVGIGCCQAVLSNNISYHEVQFNPLYNTTTSYNNRSITDRASYCGYAVVMEAAAFRFRTAYLNSTAFWDEHNGSVPVVLNWVVGNETCQVAKQMGDRYACRSKNSMCIDSSSGPTGYLCNCTEGYRGNPYLPDGCQDINECDVNNPPPCPGRCKNIPGSFTCSSPSQSRTVILAVSLSVGIVAMAMIVTCSYLVRERKKLANIKKKYFQQHGGMLLLQEIGLKQGQSTAFTIFTEAELIEATNKFEDKNVLGRGGHGTVYRGMLKDSRLIAIKRCMSMIDDRQKKEFGKEMLILSQINHKNIVKLLGCCLEVEVPMLVYEFIPNGTLFHFIHGGNDCRNIPFSTRVRIAHESAQALDYLHSSASPPIIHGDVKTSNILLDENYTAKISDFGASILVPTDEAQFVTLVQGTCGYLDPEYMQTCQLTDKSDVYSFGVVLLELLTGKMAFNLEGPENEKSLSLSFLCAMKEGRLMDIIDHHIQTDENAGVLEEVADLASQCLEMIGDNRPSMRDVADKLGRLRKVMQHPWAQHDPEEMESLLGESSVAGLEMVSTGNFSMEGGAVQGILESGR

SEQ ID NO: 2393 - protein, 591 aa, Oryza sativa; identical to SEQ ID NO: 702

SEQ ID NO: 2394 - protein, 679 aa, Lycopersicon esculentum
MSGGGCSIVWFRRDLRVEDNPALAAGVRAGAVIAVFIYAPEEEGHYYPGRVSRWWLKQSLAHLDSSLKSLGTSLITKRSTDSISSLLEVVKSTGATQLFFNHLYDPISLVRDHRTKEILTAQGISVRSFNADLLYEPWEVNDDEGRPFTTFSAFWEKCLSMPYDPEAPLLPPKRIISGDASRCPSDNLVFEDESEKGSNALLARAWSPGWSNADKALTTFVNGPLLEYSQNRRKADSATTSFLSPHLHFGEVSVRKVFHFVRIKQVLWANEGNKAGEESVNLFLKSIGLREYSRYMSFNHPYSHERPLLGHLRYFPWVVDEGYFKAWRQGRTGYPLVDAGMRELWATGWLHDRIRVVVSSFFVKVLQLPWRWGMKYFWDTLLDADLESDALGWQYISGTLPDGRELDRIDNPQFVGYKCDPHGEYVRRWLPELARLPTEWIHHPWNAPESVLEAAGIELGSNYPLPIVEIDSAKVRLEQALSQMWQNDAAARAAIENGMEEGHGDSADSPIAFPQAMHMEMDHEPVRNNPVIVTVRRYEDQMVPSMTSSLFRAEDEENSVDIRNSVVESRAEVPTDINVAEVHRRDTRDQAVMQTARTNATPHFNFAVGRRNSEDSTAESSSSTRERDGGVVPTWSPSSSNYSDQYVGDDNGIGTSSSYLQRHPQSHQLMNWQRLSQTG

SEQ ID NO: 2395 - protein, 585 aa, Halobacterium salinarum
MSQAEAITDTGEIESVSGPVVTATGLDAQMNDVVYVGDEGLMGEVIEIEGDVTTIQVYEETSGIGPGQPVDNTGEPLTVDLGPGMLDSIYDGVQRPLDVLEDEMGAFLDRGVDAPGIDLDTDWEFEPTVEAGDEVAAGDVVGTVDETVSIEHKVLVPPRSDGGEVVAVESGTFTVDDTVVELDTGEEIQMHQEWPVRRQRPTVDKQTPTEPLVSGQRILDGLFPIAKGGTAAIPGPFGSGKTVTQQSLAKFADADIVVYIGCGERGNEMTEVIEDFPELPDPQTGNPLMARTTLIANTSNMPVAGRESCIYTGITIAEYYRDMGYDVALMADSTSRWAEAMREISSRLEEMPGEEGYPAYLAARLSEFYERAGYFENFNGTEGSISVIGAVSPPGGDFSEPVTQNTLRIVKTFWALDSDLAERRHFPAINWDESYSLYKDQLDPWFTDNVVDDWAEQRQSAVDILDEESELEEIVQLVGKDALPEDQQLTLEVARYIREAWLQQNALHDVDRYCPPEKTYAILSGIKTLHEESFEALDAGVPVEEITSIDAAPRLNRLGTTPDDEHEAEVAEIKQQITEQLRELY

SEQ ID NO: 2396 - protein, 1030 aa, Pichia angusta
MTILVASLFLPYTVHFEVQVKDKCVNNDTEFDDIAEPIRQPKTSASSKDKQLKDATNTTISLIKALAKNSSASNLSQTDLIDNRIQVISEDDDGETSVSTSNTDGANQNVSVQEFFFNNPKQPTLDEISQLKEASKSSPSVNVSTSTFIQPKSRVSTTKITVSSSVSEKQATKGPELLHSSLKVNRPGLSSRRSSSKVAKQALEKPLEREKDEYPPEHENAFLPDEDKVTPFGGFSKPDYHDLFIKDNVFATAPWRVVEFDKANGSLKNAIRVAAASDPETKFRWVGVLPIPSDVVPQTTKNNIAKELSEKYDSSVAFVDDVTFHGHYTSFSKEILWPIFHYQIPDNPKSNAFENHSWKHYEKLNRAVADQIVSQYREGDIVWVHDYHLMLVPKMIREKIPNAKIGFFLHVSFPSSEVFRCLAQRNNILEGLLGADCIAFQTEEYVRHFYQTCNRLLLADFDEYGIRYKDRVISVRGNPIGVDAELLNKRLQNNLCLNWRTLVRERWADKKLIVSRDKIDRIRGIKEKLLAYERFLNDNPERVSDTILILIYTKAKMEKDDDFETSIFNIAERINAKSSNISTDQPVIFLHQDIEFEQYLALLAEADLFIISTLREGMNLTSQEFVVAAQETHSPLIMSEFVGSAQVMTEGPLLTNPYDVKQVAENIKLGLEMSPEEKLQRWKKMYATILKHDSQSWVKNCIHDIETAFASNRKDCSSELTQLSQALFKEKYHSLPHPESKRLFIINLGNLVSKVNIPGSLINPVQHEYIMSTLFNLANDPNNIVYVFSFLKRSDLLRRYRRIGELGLIAENGGYIKLPNSNDWFTVIDENELTWMPTVIEVMNALCERLPGSFVEVEECTVRFHTENCSDVDRDHKLKLVGELITHVNELYSKEFNLHANLINGIVIVQEANLIVRALSFVMNQNSFDGHLRKIPSSSLTSPVSQPSDLTMSFKNQPQLKHNLGFVMAAGGNTPVDEEVFNYFNSLEFDIENKFTIRVGQDNSNSKAEEKLSGVNELFRILSTVIASDK

SEQ ID NO: 2397 - protein, 535 aa, Hordeum vulgare
MEVNVKGNYVQVYVMLPLDAVSVNNRFEKGDELRAQLRKLVEAGVDGVMVDVWWGLVEGKGPKAYDWSAYKQLFELVQKAGLKLQAIMSFHQCGGNVGDAVNIPIPQWVRDVGTRDPDIFYTDGHGTRNIEYLTLGVDNQPLFHGRSAVQMYADYMTSFRENMKDFLDAGVIVDIEVGLGPAGEMRYPSYPQSHGWSFPGIGEFICYDKYLQADFKAAAAAVGHPEWEFPNDVGQYNDTPERTQFFRDNGTYLSEKGRFFLAWYSNNLIKHGDRILDEANKVFLGYKVQLAIKISGIHWWYKVPSHAAELTAGYYNLHDRDGYRTIARMLKRHRASINFTCAEMRDLEQSSQAMSAPEELVQQVLSAGWREGLNVACENALPRYDPTAYNTILRNARPHGINQSGPPEHKLFGFTYLRLSNQLVEGQNYVNFKTFVDRMHANLPRDPYVDPMAPLPRSGPEISIEMILQAAQPKLQPFPFQEHTDLPVGPTGGMGGQAEGPTCGMGGQVKGPTGGMGGQAEDPTSGIGGELPATM

SEQ ID NO: 2398 - protein, 1035 aa, Saccharomyces cerevisiae
MEELNIDFDVFKKRIELLYSKYNEFEGSPNSLLFVLGSSNAENPYQKTTILHNWLLSYEFPATLIALVPGKVIIITSSAKAKHLQKAIDLFKDPESKITLELWQRNNKEPELNKKLFDDVIALINSAGKTVGIPEKDSYQGKFMTEWNPVWEAAVKENEFNVIDISLGLSKVWEVKDVNEQAFLSVSSKGSDKFMDLLSNEMVRAVDEELKITNAKLSDKIENKIDDVKFLKQLSPDLSALCPPNYKFNFDLLDWTYSPIIQSGKKFDLRVSARSTNDQLYGNGCILASCGIRYNNYCSNITRTFLIDPSEEMANNYDFLLTLQKEIVTNILKPGRTPKEVYESVIEYIEKTKPELVPNFTKNIGSLIGLEFRDSNFILNVKNDYRKIQRGDCFNISFGFNNLKDSQSANNYALQLADTVQIPLDETEPPRFLTNYTKAKSQISFYFNNEEEDNNKKKSSPATKVPSKPDRNSKILRTKLRGEARGGAEDAQKEQIRKENQKKLHEKLEKNGLLRFSAADANGPDSEPRQYFKKYESYVRDSQLPTNIRDLRIHVDWKSQTIILPIYGRPVPFHINSYKNGSKNEEGEYTYLRLNFNSPGSSGGISKKVEELPYEESADNQFVRSITLRSKDGDRMSETFKQIADLKKEATKREQERKALADVVQQDKLIENKTGRTKRLDQIFVRPNPDTKRVPSTVFIHENGIRFQSPLRTDSRIDILFSNIKNLIFQSCKGELIVVIHIHLKNPILMGKKKIQDVQFYREASDMSVDETGGGRRGQSRFRRYGDEDELEQEQEERRKRAALDKEFKYFADAIAEASNGLLTVENTFRDLGFQGVPNRSAVFCMPTTDCLVQLIEPPFLVINLEEVEICILERVQFGLKNFDMVFVYKDFNKPVTHINTVPIESLDFLKQWLTDMDIPYTVSTINLNWATIMKSLQDDPYQFFLDGGWNFLATGSDDEASDESEEEVSEYEASEDDVSDESAFSEDEEGSEVDDDISGDESEDYTGDESEEGEDWDELEKKAARADRGANFRD

SEQ ID NO: 2399 - protein, 508 aa, Oryza sativa; identical to SEQ ID NO: 749

SEQ ID NO: 2400 - protein, 294 aa, Nicotiana tabacum
MDQYEKVEKIGEGTYGVVYKARDRVTNETIALKKIRLEQEDEGVPSTAIREISLLKEMQHANIVRLQDVVHSEKRLYLVFEYLDLDLKKHMDSSPEFSEDPRLVKMFLYQILRGIAYCHSHRVLHRDLKPQNLLIDRRTNALKLADFGLARAFGIPVRTFTHEVVTLWYRAPEILLGSRHYSTPVDVWSVGCIFAEMVTQRPLFPGDSEIDELFKIFRVMGTPNEDTWPGVTTLPDFKSAFPKWPSKDLATIVPNLDGAGLDLLDKMLRLDPSKRITARNALEHEYFKDIGYVP

SEQ ID NO: 2401 - protein, 483 aa, Nicotiana tabacum
MATTQNRRSSVSSATTKRQAMTSNSSLENNNHGKLVAKKRPALTNISNHTTASARNSLSHSSKLAPCTSKAVSIKKSNSNAASSVLPTSSFVKPISKTVSIPRSDAAIPKITAIPLPATCSMDISPSHSDGSLVSMDETMSTSDSLRSPDVEYIDDNQTAAFDSIEKKAFSTLYISEDVKAADICKRDVLVDIESGDKIANIDNNFVDPQLCATMACDIYKHLRATEVKKRPSTDFMEKVQKDINASMRAILIDWLVEVAEEYRLVPDTLYLTVNYIDRYLSGNLMDRQRLQLLGVACMMIASKYEEICAPQVEEFCYITDNTYFKEEVLQMESTVLNYLKFEMTAPTAKCFLRRFVRAAQGLNEVLSLQLEHLASYIAELSLLEYNMLCYAPSVIAASAIFLAKYILLPSKKPWNSTLRHYTLYQPSDLRDCVVALHSLCCNNNNSSLPAIREKYSQHKYKFVAKKYCPPTIPVEFFQNISC

SEQ ID NO: 2402 - protein, 597 aa, Oryza sativa
MDTTIGSVPTASDAAAPAPAANSAPREATLGRHLARRLAEVGARDVFTVPGDFNLTLLDELEAEAGAGHGGVRLVGCCNELNAAYAADGYARARGGGVGACAVTFTVGGLSAINAVAGAFSENLPVVCIVGGPNSNDYGSNRILHHTIGLPDFTQELRCFQTVTCYQAVVNNLEDAHEQIDAAISTAIKESKPVYISISCNLPSIPHPTFSRHPVPFFLSPRLSNQMNLEAAVETAAAFLNKAVKPVLVGGPKMRVAKACKSFVELADACGYPVAVMPSAKGLVPEHHPRFIGTYWGAVSTPFCAEIVESADAYLFAGPIFNDYSSVGYSLLLKKEKAIIVQPDRVVIGHGPAFGCVLMKDFLHALSARLKKNTAAYENYRRIYVPPGEPPLSEPGEPLRVNVLFQHIQKMLSANSAVIAETGDSWFNCQKLKLPEGCGYEFQMQYGSIGWSVGATLGYAKAAKDKRVIACIGDGSFQVTAQEVSTMLRWGQKSIIFLINNGGYTIEVEIHDGPYNVIKNWNYTGVVEAFHNGEGKCYTAKVRTEEELKEAIEEAQGPKKDCLCFIEVIVHKDDTSKELLEWGSRVSAANSRPPNPQ

SEQ ID NO: 2403 - protein, 484 aa, Glycine max; identical to SEQ ID NO: 660

SEQ ID NO: 2404 - protein, 642 aa, Vicia faba
MRNDSPYTPLLNASHNNHRRRELLLLFSGLLLLASIIAFSAYIAQPHADADVSSSSSILSDEATRPTTLSRGVSSGVSEKSNTFLLSGNLVGEGGSFPWNNTMLSWQRTAFHFQPEKNWMNDPNGPLYYKGWYHFFYQYNPNGAVWGDIVWGHAVSRDLIHWLHLPLAMVADQWYDSNGVWTGSATILPDGQVIMLYTGSTNEFVQVQNLAYPADLNDPLLVDWIKYPSNPVLVPPPGILPKDFRDPTTAWLTTEGKWRITIGSKINKTGVALVYDTVDFKTYERKDMLLNAVPGTGMWECVDFFPVSMKSENGLDTSFTGDEVKHVMKVSLDDDRHDYYALGTYDEKKVKFIADDFENDVGIGLRYDYGIFYASKTFYDQKKDRRVLWGWIGESDSEYADVAKGWASVQSIPRIVKLDKKTGSNLLQWPVAEVESLRLRSDEFQNLKVKPGAVVSVDIETATQLDIVAEFEIDKEALEKTAQSNVEYECNTSGGASRRGALGPFGLYVLADNGLSEYTPVYFYVVKGINGKLHTSFCSDQSRSSLANDVHKQIYGSVVPVLEGEKLSLRILVDHSIVESFAQGGRTCITSRVYPTRAIYGAARLFLFNNAIETNVTASLKVWQMNSAFIRPYHPDQKRQTS

SEQ ID NO: 2405 - protein, 593 aa, Enterococcus hirae
MQIGKIIKVSGPLVMAENMSEASIQDMCLVGDLGVIGEIIEMRQDVASIQVYEETSGIGPGEPVRSTGEALSVELGPGIISQMFDGIQRPLDTFMEVTQSNFLGRGVQLPALDHEKQWWFEATIEEGTEVSAGDIIGYVDETKIIQHKIMVPNGIKGTVQKIESGSFTIDDPICVIETEQGLKELTMMQKWPVRRGRPIKQKLNPDVPMITGQRVIDTFFPVTKGGAAAVPGPFGAGKTVVQHQIAKWSDVDLVVYVGCGERGNEMTDVVNEFPELIDPNTGESLMERTVLIANTSNMPVAAREASIYTGITIAEYFRDMGYDVAIMADSTSRWAEALREMSGRLEEMPGDEGYPAYLGSRLAEYYERSGRVIALGSDQREGSITAISAVSPSGGDISEPVTQNTLRVVKVFWGLDSSLAQKRHFPSINWIQSYSLYSTEVGRYMDQILQQDWSDMVTEGMRILQEEEQLNEIVRLVGIDSLSDNDRLTLEVAKSIREDYLQQNAFDDVDTFTSREKQFNMLKVILTFGKEARKALSLGAYFNEIMEGTVAVRERISRSKYIPEEELAKISSINEEIKETIQLIVSEGGMTDD

SEQ ID NO: 2406 - protein, 1013 aa, Arabidopsis thaliana
MEEVQPPVTPPIEPNGKRSEASLLDICEKVLSLDGSTCDEALKLFTETKRILSASMSNIGSGTREEVERFWFAFILYSVKRLSVRKEADGLSVSGDNEFNLCQILRALKLNIVDFFKELPQFVVKAGSVLGELYGADWENRLQAKEVQANFVHLSLLSKYYKRGFREFFLTYDANAEKNSANSSTYLLDSYRFGWLLFLALRNHAFSRFKDLVTCSNGVVSILAILIIHVPCRFRNFSIQDSSRFVKKGDKGVDLVASLCKIYDASEDELRIVIDKANNLVETILKKKPSPASECQTDKLDNIDPDGLTYFEDLLEETSISTSLITLEKDYYDGKGELDERVFINEEDSLLGSGSLSAGAVNITGVKRKIDALSSPARTFISPLSPHKSPAAKTNGISGATKLAATPVSTAMTTAKWLRTVISPLLPKPSPGLEHFLKSCDRDITNDVTRRAHIILEAIFPNSSLGAQCGGGSLQAVDLMDDIWAEQRRLEACKLYYRVLEAMCKAEAQILHANNLNSLLTNERFHRCMLACSAELVLATHKTITMLFPAVLERTGITAFDLSKVIESFIRHEDSLPRELRRHLNSLEERLLESMVWEKGSSMYNSLIVARPSLALEINQLGLLAEPMPSLDAIAALINFSDGANHASSVQKHETCPGQNGGIRSPKRLCTDYRSILVERNSFTSPVKDRLLALGNVKSKMLPPPLQSAFASPTRPNPGGGGETCAETGINIFFTKINKLAAVRINGMVERLQLSQQIRESVYCFFQHVLAQRTSLLFSRHIDQIILCCFYGVAKISQMSLTFREIIYNYRKQPQCKPLVFRSVYVDALQCRRQGRIGPDHVDIITFYNEIFIPAVKPLLVELGPVRNDRAVEANNKPEGQCPGSPKVSVFPSVPDMSPKKVSAVHNVYVSPLRGSKMDALISHSTKSYYACVGESTHAYQSPSKDLSAINNRLNNSSSNRKRTLNFDAEAGMVSDSMVANSLNLQNQNQNQNGSDASSSGGAAPLKTEPTDS

SEQ ID NO: 2407 - protein, 473 aa, Arabidopsis thaliana
MRSLKLLLCWISFLTLSISISASSDDQFTLDGTVLELTDSNFDSAISTFDCIFVDFYAPWCGHCKRLNPELDAAAPILAKLKQPIVIAKLNADKYSRLARKIEIDAFPTLMLYNHGVPMEYYGPRKADLLVRYLKKFVAPDVAVLESDSTVKEFVEDAGTFFPVFIGFGLNESIISGLGRKYKKKAWFAVSKEVSEDTMVSYDFDKAPALVANHPTYNEHSVFYGPFEDGFLEEFVKQSFLPLILPINHDTLKLLKDDERKIVLTIVEDETHESLEKLYKALRAAAHANRDLVFGYVGVKQFEEFVDSFHVDKKTNLPKIVVWDGDEEYDQVTGIETITQEEDHLTQVSRFLEGYREGRTEKKKINGPSFMGFINSMIGIRSVYILVFLVAVIMMLRSLGQVEEPTGVRTATAVRERVDQATTVPEDESKFGPGEIKGVVSDAGGTSFPVLGFCLQTGQKDLQRPSQESIHTA

SEQ ID NO: 2408 - protein, 811 aa, Arabidopsis thaliana
MSEMASMDPEGIDGVRMTWNVWPRTKVEASKCVIPVAACISPIRYHRDIPSVEYAPLRCRICTAALNPFARVDFLAKIWICPICFQRNHFPPHYHVMSETNVPCELYPQYTTVEYTLPNPSQPTGVGNFDQTGAVSGQPSPSVFVFVLDTCMIEEEFGYAKSALKQAIGLLPENALVGFVSFGTQAHVHELGFSDLTKVYVFRGDKEISKDQVLEQLGLGASGRRNPVGGFPMGRDNSANFGYSGVNRFLLPASDCEFTIDLLLEELQTDQWPVQAGRRQSRCTGVAISVATGLLGACFPGTGARIVALIGGPCSEGPGTIVSKDLSEPLRSHKDLDKDAAPFYKKAEKFYDALANQLVNQGHVLDLFASALDQVGVAEMKAAVERTGGLVVLSESFGHSVFKDSFKRVFEDGEESLGLCFNGTLEICCSKDIKIQGIIGPCASLQKKGPSVADTVIGEGNTTQWKMCGLDKRTCLTVFFDLSSSDQSSAPGGVNNQLYLQFMTSYQNSKGKTLQRVTTVTRQWVDTGLSTEELVQGFDQETAAVVVARLASLKMETEEGFDATRWLDRNLIRLCSKFGDYRKDDPASFTLNPNFSLFPQFTFNLRRSQFVQVFNNSPDETAYNRMLLNRENISNAAVMIQPSLTTYSFNSLPQPALLDVASIGADRILLLDSYISVVVFHGMTIAQWRNLGYQNQPEHQVMNMQVALALDFLEYEPYMSRLTSLFVKAFAQLLEAPQEDAQMIIRDRFPVPRLVVCDQHGSQARFLLAKLNPSATYNNASEMNAGSDIIFTDDVSLQVFFQHLQKLAVQS

SEQ ID NO: 2409 - protein, 1072 aa, Arabidopsis thaliana
MLGDFNQVLLPQEHSNPPSLNIDRRMRDFGSCLSEMELSDLVFKGNSFTWWNKSSIRPIAKKLDRILANDSWCNLYPSSHGLFGNLDFSDHVSCGVVLEANGISAKRPFKFFNFLLKNEDFLNVVMDNWFSTNVVGSSMYRVSKKLKAMKKPIKDFSRLNYSGIELRTKEAHELLITCQNLTLANPSVSNAALELEAQRKWVLLSCAEESFFHQRSRVSWFAEGDSNTHYFHRMVDSRKSFNTINSLVDSNGLLIDSQQGILDHCVTYYERLLGSIESPFSMEQEDMNLLLTYRCSQDQCSELEKSFTDDEIKAAFKSLPRNKTSGPDGYSVEFFRDTWSIIGPEVLAAIHEFFDSGQLLKQWNATTLVLIPKTSNACTISEFRPISCLNTLYKVISKLLTSRLQGLLSAVIGHSQSAFLPGRSLAENVLLATEMVHGYNRLNISPRGMLKVDLKKAFDSVKWEFVTAALRALAIPERYINWIHQCITTPSFTISVNGATGGFFRSTKGLRQGDPLSPYLFVLAMEVFSKLLYSRYDSGYIHYHPKAGDLSISHLMFADDVMIFFDGGSSSMHGICETLDDFADWSGLKVNKDKSQLFQAGLDLSERITSAAYGFPAGTFPIRYLGLPLMCRKLRIADYGPLLEKLSARLRSWVSKALSFAGRTQLISSVIFGLINFWMSTFLLPKGCIKKIESLCSKFLWAGSIDGRKSSKVSWVDCCLPKSEGGLGFRSFGEWNKTLLLRLIWVLFDRDTSLWAQWQRHHRLGHASFWQVNALQTDPWTWKMLLNLRPLAEKFIKAKVGNGGTVSFWFDCWTSLGPLIKYLGDVGSRPLRIPFSAKVADAIDGSGWRLPLSRSLTADSILSHLASLPPPSPLMVSDSYSWCVDDVDCQGFSAAKTWEVLRPRRPVKRWAKSVWFKGAVPKHAFNFWTAQLNRLPTRQRLVSWGLVSSAECCLCSFDTETRDHLLLLCDFSSQVWRMVFLRLCPRQRLLCTWAELLSWTRQSTAAAPSLLRKVVAQLVVYNLWRQRNLVLHSSLRVSCSVVFRLVDRELRNVILSRRHKRRWRELLLLWIR

SEQ ID NO: 2410 - protein, 475 aa, Triticum aestivum; identical to SEQ ID NO: 905

SEQ ID NO: 2411 - protein, 900 aa, Zygosaccharomyces rouxii
MVNSGHRRQRIINCVAQLPYKIQLGETNDEWNIVPATGSSSLYSSIEYLNSEEKAKDYEQHVLGWTGEIGRESLPSRLFNSKNRDKSENGEKGENDLHAKEEREKEEDPLYLTNDQIDGITKDLRRHGKSDDHYNVDNVHPVWLLRRDQKRWRGFAENVLWPTFHYILKFSSDSGEKENLSWYDYVRFNEAYAMKIGEIYEKGDIIWIHDYYLLLLPQLLRMKFNDQDLTIAYFHHSPWPSNEYFRVLPRRKQILDGLMGADRGWFQNEGFARHFVSSCKRLLDSTSRKSKNRLGMEQYQISAYGGDIVVDSLPIGINRVKLLEDTFTKDIAQKVLAIKDAFQGKKIIVGRDRLDSVRGVVQKLRAFETFLSMYPEWRDQVVLIQVSVPSMKGGTNQLIRLEQQVNELVTSINMQYGSLNFSPVHHYYMRIPKDVYLSLLRVADLCVIASVRDGTNTTALEYVTVKSHMSNYNCYGNPLILSEFSGTSTILKDAMIINPWDSVAVAKSINRALSLSRDEKRALEDKIWPQVPTIQKWTDQFLSTLSDIVDEAHNTTDRKMTPALNRPALLEHYRQSKRRLFLFDYDGTLTPIVQDPAAAIPSARLISILQKLASDPCNQIWIISGRDQAFLNKWLGSRLPQLGLSAEHGCFYKDVDEENWINLTEKFDMSWQEKVGSIMEEFTRRTPGSFIERKKVALTWHYRRADPELGEFYASELKKELDKICADYDLDVMEGKANIEVRPKFVNKGEIVKRLVWHHHGRRQDMLNTKKEELPISEMPDFTLCLGDDFTDEDMFNQLNDIEAVWKKQYEDEVNQWGGFGLYPCTVGSASKKTVAKAHLTDPQQVLDTLGLLVGDVSLFQSAGTVELDSRGHVKHSDSSIRSEQASARYAMKRQQSYKN

SEQ ID NO: 2412 - protein, 513 aa, Schizosaccharomyces pombe
MSDAHDTIKSLTGDASNSRRLIVVSNRLPITIKRKDNGTYDFSMSSGGLVSALSGLKKLMTFQWLGWCGQEIPEDEKPMIIQRLQDECSAIPVFLDDETADRHYNGFSNSILWPLFHYHPGEINFDEENWEAYRAANYAFAEAIVKNLQDGDLIWVQDYHLMVLPQMLRELIGDKFKDIKIGFFLHTPFPSSEIYRVLPVRNEILEGVLNCDLVGFHTYDYARHFLSACSRILNLSTLPNGVEYNGQMVSVGTFPIGIDPEKFSDALKSDVVKDRIASIERRLQGVKVIVGVDRLDYIKGVPQKFHAFEVFLEQYPEWVGKVVLVQVAVPSRQDVEEYQNLRAVVNELVGRINGRFGTVEYTPIHFLHKSVRFEELVALYNVSDVCLITSTRDGMNLVSYEYICTQQERHGALILSEFAGAAQSLNGSIVINPWNTEELANSIHDALTMPEKQREANENKLFRYVNKYTSQFWGQSFVGELQRIQHYSHPHPRRTNPILRTKSAQVLSMNSSS

SEQ ID NO: 2413 - protein, 334 aa, Arabidopsis thaliana
MGRSPISDDSGLKKGPWTPDEDEKLVNYVQKHGHSSWRALPKLAGLNRCGKSCRLRWTNYLRPDIKRGRFSPDEEQTILNLHSVLGNKWSTIANQLPGRTDNEIKNFWNTHLKKKLIQMGFDPMTHRPRTDIFSGLSQLMSLSSNLRGFVDLQQQFPIDQEHTILKLQTEMAKLQLFQYLLQPSSMSNNVNPNDFDTLSLLNSIASFKETSNNTTSNNLDLGFLGSYLQDFHSLPSLKTLNSNMEPSSVFPQNLDDNHFKFSTQRENLPVSPIWLSDPSSTTPAHVNDDLIFNQYGIEDVNSNITSSSGQESGASASAAWPDHLLDDSIFSDIP

SEQ ID NO: 2414 - protein, 608 aa, Arabidopsis thaliana
MFCSLSISRFVSRKTITSSSLLSRSFRFLLSVDSPPHIPLLRPSSNTLIPSSSFSRRIWDSCSGGGGGGGGDDYDHIRSDVNCPRCSAQMHVIFSNRPLSLTAREPGIYQAVNFCSQCKTAFYFRPFKLSPLQGSFIELGKVKGTDDDHDDDDDDQKSFPRNWKIQGLRSDEDGEDADEEEDESNGGDKEKQSVIKLPTPKEICQGLDEFVIGQEKAKKVLSVAVYNHYKRIYHASRKKGSASESYNIDMEDDNIDHVELDKSNVLLLGPTGSGKTLLAKTLARIVNVPFAIADATSLTQAGYVGEDVESILYKLYVEAGCNVEEAQRGIVYIDEVDKMTMKSHSSNGGRDVSGEGVQQSLLKLLEGTVVSVPIPEKGLRRDPRGDSIQMDTKDILFICGGAFIDLEKTVSERQHDASIGFGASVRTNMSTSGLSSAAVTSSLLESLQSEDLVAYGLIPEFVGRLPILVSLSALNEDQLVQVLTEPKSALGKQYKKLFRMNNVQLQFTEGATRLIARKAMSKNTGARGLRSILESILTEAMFEVPDSITEGSQSIKAVLVDEEAVGSVGSPGCGAKILKGDNVLQQFVEEAESKEKSKEDEAKRAQSM

SEQ ID NO: 2415 - protein, 451 aa, Arabidopsis thaliana
MSYTSTDSDHNESPAADDNGSDCRSRWDGHALKKGPWSSAEDDILIDYVNKHGEGNWNAVQKHTSLFRCGKSCRLRWANHLRPNLKKGAFSQEEEQLIVELHAKMGNRWARMAAHLPGRTDNEIKNYWNTRIKRRQRAGLPLYPPEMHVEALEWSQEYAKSRVMGEDRRHQDFLQLGSCESNVFFDTLNFTDMVPGTFDLADMTAYKNMGNCASSPRYENFMTPTIPSSKRLWESELLYPGCSSTIKQEFSSPEQFRNTSPQTISKTCSFSVPCDVEHPLYGNRHSPVMIPDSHTPTDGIVPYSKPLYGAVKLELPSFQYSETTFDQWKKSSSPPHSDLLDPFDTYIQSPPPPTGGEESDLYSNFDTGLLDMLLLEAKIRNNSTKNNLYRSCASTIPSADLGQVTVSQTKSEEFDNSLKSFLVHSEMSTQNADETPPSELLFTLPSLEIVC

SEQ ID NO: 2416 - protein, 660 aa, Chlamydophila pneumoniae
MSEHKKSSKIIGIDLGTTNSCVSVMEGGQAKVITSSEGTRTTPSIVAFKGNEKLVGIPAKRQAVTNPEKTLGSTKRFIGRKYSEVASEIQTVPYTVTSGSKGDAVFEVDGKQYTPEEIGAQILMKMKETAEAYLGETVTEAVITVPAYFNDSQRASTKDAGRIAGLDVKRIIPEPTAAALAYGIDKVGDKKIAVFDLGGGTFDISILEIGDGVFEVLSTNGDTLLGGDDFDEVIIKWMIEEFKKQEGIDLSKDNMALQRLKDAAEKAKIELSGVSSTEINQPFITMDAQGPKHLALTLTRAQFEKLAASLIERTKSPCIKALSDAKLSAKDIDDVLLVGGMSRMPAVQETVKELFGKEPNKGVNPDEVVAIGAAIQGGVLGGEVKDVLLLDVIPLSLGIETLGGVMTTLVERNTTIPTQKKQIFSTAADNQPAVTIVVLQGERPMAKDNKEIGRFDLTDIPPAPRGHPQIEVSFDIDANGIFHVSAKDVASGKEQKIRIEASSGLQEDEIQRMVRDAEINKEEDKKRREASDAKNEADSMIFRAEKAIKDYKEQIPETLVKEIEERIENVRNALKDDAPIEKIKEVTEDLSKHMQKIGESMQSQSASAAASSAANAKGGPNINTEDLKKHSFSTKPPSNNGSSEDHIEEADVEIIDNDDK

SEQ ID NO: 2417 - protein, 562 aa, Arabidopsis thaliana
IRHEKVEAFPWNNTILSWQRTAFHFQPEKNWMNDPNGPLFYKGWYHFFYQYNPNAAVWGDIVWGHAVSKDLIHWLYLPIAMVPDQWYDANGVWTGSATFLDDGSIVMLYTGSTDGFVQVQNLAYPEDPSDPLLLKWVKFSGNPVLVPPPGIGAKDFRDPTTAWKTSSGKWRITIGSKINRTGISLIYDTTDFKTYEKHDTLLHQVPNTGMWECVDFYPVSKTQVNGLDTSVNGPDVKHVIKASMDDTRIDHYAIGTYDDSNATWVPDNPSIDVGISTGLRYDYGKYYASKTFYDQNKGRRILWGWIGESDSEAADVQKGWSSVQGIPRTVVLDTRTHKNLVQWPVEEIKSLRLSSKKFDMTIGPGTVVPVDVGSATQLDIEAEFEIKTDDLKLFFDDDSVEADNKFSCETNGGSTARGALGPFGFSVLADENLSEQTPVYFYVTKGKHSKLNTVFCTDTSRSTLANDVVKPIYGSFVPVLKGEKLTMRILVDHSIVEGFAQGGRSCITSRVYPTKAIYGATKLFLFNNAIDATVTTSFTVWQMNNAFIHPYSSDDLGVPSST

SEQ ID NO: 2418 - protein, 364 aa, Ralstonia eutropha
MPEVQRMTLTQFLIEERRRYPDASGGFNGLILNVAMACKEIARAVAFGALGGLHGKASTQAGEEGAVNVQGEIQQKLDVLSNTTFLRVNEWGGYLAGMASEEMEAPYQIPENYPRGKYLLVFDPLDGSSNIDVNVSVGSIFSVLRAPEGADTVTEQDFLQPGSAQVAAGYALYGPTTMLVLTVGNGVNGFTLDPNLGEFFLTHPHLRVPPDTQEFAINASNSRFWEAPVQRYIGECMAGKSGPRGKDFNMRWIASMVAEAHRILMRGGVFMYPRDTKDPAKPGRLRLLYEANPIAFLMEQAGGRASTGRQTLMSVAPGALHQRIGVIFGSRNEVERIEGYHTNQTDPDLPSPLFNERSLFRASA

SEQ ID NO: 2419 - protein, 364 aa, Ralstonia eutropha
MPEVQRMTLTQFLIEERRRYPDASGGFNGLILNVAMACKEIARAVAFGALGGLHGKASNQAGEAGAVNVQGEIQQKLDVLSNTTFLRVNEWGGYLAGMASEEMEAPYQIPDHYPRGKYLLVFDPLDGSSNIDVNVSVGSIFSVLRAPEGASAVTEQDFLQPGSAQVAAGYALYGPTTMLVLTVGNGVNGFTLDPNLGEFFLTHPNLQVPADTQEFAINASNSRFWEAPVQRYIAECMAGKSGPRGKDFNMRWIASMVAEAHRILMRGGVFMYPRDSKDPAKPGRLRLLYEANPIAFLMEQAGGRASTGRQTLMSVAPGALHQRIGVIFGSRNEVERIEGYHTDQTDPDLPSPLFNERSLFRASA

SEQ ID NO: 2420 - protein, 432 aa, Oryza sativa
MLISEYNWNATYKFDMFSTHEHEALQKREPIKAHLLSQPTRYVILVAHAMSAISRPSIILGAHTVTTNGSSARTHEAERNSTVERSTHVLKAASSPKSPKSPIRISPPRRRCGRSSPPLSLLFPHGDRHRVALRGGEVMWLGFVCSIRHVEGFMASPHSQEVKRWVLSDFDIGKPLGRGKFGHVYLAREKRSNHIVALKVLFKSQLKQSQVEHQLRREVEIQSHLRHPNILRLYGYFYDTRVYLILEYALKGELYKELQRCKHFSERRSATYIASLAHALIYLHGKHVIHRDIKPENLLIGSQGELKIADFGWSVHTFNRRRTMCGTLDYLPPEMVEKTEHDYHVDIWSLGILCYEFLYGVPPFEAKEHSETYRRIVKVDLKFPLKPFVSPAAKDLISQMLVKNSAHRLPLHKLLEHPWIVQNADPSGVYRG

SEQ ID NO: 2421 - protein, 638 aa, Xylella fastidiosa
MGKIIGIDLGTTNSCLAIIEGGKGRVIENSEGDRTTPSIVAYTKDGEVLVGAAAKRQAVTNPKNTFYAVKRLIGRKFGDAEVQKDLDLVPYKITQHDNGDAWVATADAKKLAPQEISAKVLEKMKKTAEDFLGEKVTEAVITVPAYFNDSQRQATKDAGRIAGLDVKRIINEPTAAALAYGLDKKGGDRKIAVYDLGGGTFDVSIIEIAEVDGEKQFEVLATNGDTFLGGEDFDKRVIDYLVDEFNKDQGIDLRKDPLALQRLKDAAERAKIELSSSQQTEVNLPYITADASGPKHLNIKLTRAKLEALVDDLVRKSIEPCRIALNDAGLRTSDVQEVILVGGQTRMPKVQQAVADFFGKEPRKDVNPDEAVALGAAIQGGVLAGDVKDVLLLDVTPLSLGIETMGGVFTKIIEKNTTIPTKASQVFSTAEDGQSAVTVHVLQGEREQARFNKSLAKFDLAGIEPAPRGQPQIEVSFDIDANGILHVSAKDKKTNKEQKVEVKAGSGLSDSEIQQMVADAEAHREEDKKFQELVQARNHADGLIHSTRSAIKEHGSKVGGEVIGRVEASLAELEAAVKGDDKNQIEAKSKTLEEVAQSLHMAATAEQQSGSTGAGAGSSAKVDDVVDAEFTEVKGDKK

SEQ ID NO: 2422 - protein, 265 aa, Bacillus anthracis
MKGMDNNAPHGFFGGGSDSYEQMMLMGGAGQQGYGGIPSWMGGSPGGFSTSVAGVQTGMPTSMGGFSTSGAGMPAVTGGFPTSVAGVQTGFPVPGVGVVAGGIGGFPQVIHGHHGHHHHQGHHGHHGHHHHQGHHGHHGHHHHQGHHGHQGHHHHQGHHGHHGHHQQQVHHHGHHHIHPQAILYQTHQGHQGHHDHHGHHGHQGHHGQHSQQHQQHQQYQQYQQYQQYQQQSSPWAGGIGAGAAGAAAGAASISGAAGHAGHVGH

SEQ ID NO: 2423 - protein, 130 aa, Bacillus anthracis
MGGFPQVIHGHHGHHHHQGHHGHHGHHHHQGHHGHHGHHHHQGHHGHQGHHHHQGHHGHHGHHQQQVHHHGHHHIHPQAILYQTHQGHQGHHDHHGHHGHQGHHGQHSQQHQQHQQYQQYQQYQQQSSPW

SEQ ID NO: 2424 - protein, 133 aa, Bacillus anthracis
MGGFPQVIHGHHGHHHHQGHHGHHGHHHHQGHHGHHGHHHHQGHHGHQGHHHHQGHHGHHGHHQQQVHHHGHHHIHPQAILYQTHQGHQGHHDHHGHHGHQGHHGQHSQQHQQHQQYQQYQQYQQYQQQSSPW

SEQ ID NO: 2425 - protein, 575 aa, Arabidopsis thaliana
MLEKVETFDMNRVIDEFDEMTRNAHQVQKQTLKEILLKNQSAIYLQNCGLNGNATDPEEAFKSMVPLVTDVELEPYIKRMVDGDTSPILTGHPVPAISLSSGTSQGRPKFIPFTDELMENTLQLFRTAFAFRNRDFPIDDNGKALQFIFSSKQYISTGGVPVGTATTNVYRNPNFKAGMKSITSPSCSPDEVIFSPDVHQALYCHLLSGILFRDQVQYVFAVFAHGLVHAFRTFEQVWEEIVTDIKDGVLSNRITVPSVRTAMSKLLTPNPELAETIRTKCMSLSNWYGLIPALFPNAKYVYGIMTGSMEPYVPKLRHYAGDLPLVSHDYGSSEGWIAANVTPRLSPEEATFAVIPNLGYFEFLPVSETGEGEEKPVGLTQVKIGEEYEVVITNYAGLYRYRLGDVVKVIGFYNNTPQLKFICRRNLILSINIDKNTERDLQLSVESAAKRLSEEKIEVIDFSSYIDVSTDPGHYAIFWEISGETNEDVLQDCCNCLDRAFIDAGYVSSRKCKTIGALELRVVAKGTFRKIQEHFLGLGSSAGQFKMPRCVKPSNAKVLQILCENVVSSYFSTAF

SEQ ID NO: 2426 - protein, 509 aa, Cucumis sativus
MAKKDDSATRPPLQRPTITLPPRPSMEAFFTGVPTGVSPGPMTLLSSYLADFADGAVDSPSFSQLLAGAMASPMAMGFFGTGSTPNYYAKDGPASELEFGMKQSKPVNLVVARSPLFSVPPGLSPSGLLNSPGFYPPQSPFGMSHQQALAQVTAQAALANSHMHMQQAEYQHSSVPAPTEPLVRDPSFSLDDASQLAIIPSTSDTKSLIAESTEVSHSDRKYQPPPPPHGSDKPADDGYNWRKYGQKLVKGSEFPRSYYKCTHLNCPRKKKIEGLPDGEITEIIYKGQHNHEPPPANKRARDNIEPAGCTNSLIKPECGLQNQAGILNKSSENVQLGSSDSEGRADTEITDDRDEDEPNPKRQNIDAGTSGVALSHKTLTEPKIIVQTRSEVDLLDDGYRWRKYGQKVVKGNPNPRSYYKCTSAGCNVRKHVERSSTDSKAVVTTYEGKHNHDVPAARNSSHHTVNNTVHHIKPLKVVAQKHPLLKEMEFGTNDQRPAVLQLKEEQITV

SEQ ID NO: 2427 - protein, 1532 aa, Arabidopsis thaliana
MDRNREARRVPMAAAGNGLSRRRHRAGSFRDSPEEEGPVELPEAARLRDRGGSNKKDRDRERDRDRERERERDRERDRLNSRSKRRRGERLMMVHGNLDDGGDDSSEESVNDDEEYDDGGVGPPSSLKMLPPTSNNISAASFSSSLSNHHNGGSGNLHHHHHSHNNNHQRKNNFPPTKVFRSSPSPAPVSPLVSTWKAADEMIGVSVPRKARSACTKRPHESWASSTTGGGVFASGEQIHRQISSTSPANRVSPASILASPSPPAPTSPSSSSISVRKKLPSGTKQKPLPPKSSSSKLSSPVAVQDEIEIEIAEVLYGMMRMPSTSKQEAAGNDLTEAAKSTVEVKSRVSSPISNPQTLPQSSITLAANSSSSNVSAIAPKRKKPRHVKYEDDNSSRVTTIKSEAEAPSKSQVPFSNQLKSSGSGEGNSSVLDSIIPLTRESNASLDSEKKENNLSKDETILPKVESSSGFRSDGEGAKSSSPEKEKFEIDLMAPPPVRSSSERGGEMMECVAAEAKPKVTEVETEAKPLLKEDRSDPAIHDSQEKKRPRMVAEAEHHKFERNCELKLDLDKSDHVGLVNKHHVQKPPPQQQLSVPDKTAQASHLPLHMSMPGWPGGLPTMGYVFFPPPHLLFNQPRPKRCATHCYIARNIQSHQQFTKMNPFWPAAAGSAPMYGTKACNLSLMPPTELQGSVLGRSSNPVQDKNSQSTSKSSETAQRNQLMLQQALPPGAANSILHGPTFIFPLGQQPHAAATIAAASVRPPNSGITSSGPTATSTSMNGSASATPAGAPTMSFSYPAMPGNETQYLAILQNNGYPFPVPAHVGAQPAYRGAPGQPMPFFNGSFYSSQMIQPPHHQPQKQHQQQLTGQMLQSHAPNNQNGSASTGSSAAQKHLQNQQLRPPINHGNSQGFPTHKVQSQPLNFQQRQQPRENATQHSETVGEDSPSTADSRGSRSNVAYGQNYGMQMQPTNLGLMSSPAPGGGVVGSSSSHGEKKSQQQVSKAGVESFQSPGYAMTFATFNGANTAPTLNMSSIAQNHAMFHSMPEAARQGYQMMAAQAAQQKMNYGASLEDGKSGSIGGAATANNTPEEQRKSGGGAIGKTSGGNGGQSIAFSNKQDLADASVSAVTSGSIVDSSSRLLNLGSALPQSSGSLPTSHHQQLLQQQQQQHMQRSQSQQPYTTMYLQKQQRYATSVAASAARTKGPVVSNGSGFPDHNMTTSPAGTTKFANANSGFPQNLVQSSSNQVQSQQWKNNSPRTTNTTQAQSPSMLSPSTSVAAASSLRNIPHKQQSRPQQSQISFAANSKPMTSGSPMQQVQGGTNHQAPSPPMLVGSPSTSSVSKNASGSPRTTASASSAANKGGQASTTTHSASQPSKNLQPASAASSAGGRNNGPSVLGNPTTSSGSKSQQQQQLPKHGLQPQAQLFFSNPYMQAQHQHQQQQITISPSGGYYIQRHQQQSGSAPAVPVTGAVTATSDPAKAIAAASAANNMKGGGGMGKTQQHQLGPPGFTNVHAVSSAVQVKPVDQKQQAGE

SEQ ID NO: 2428 - protein, 765 aa, Arabidopsis thaliana
MAETANTDLEGIDGVRMTWNVWPHSKAEASKCVIPLAACISPIRRHADIPTLPYAPLRCRTCSAALNAYAQVDFTAKLWICPFCYQRNHFPPHYHVISETNLPGELYPQYTTVEYTLPPPVANGEGLVDPPVFVFVLDTCMIEEELDFAKSALKQAIGLLPENALVGFVSFGTQAHVHELGFSEMSKVFVFKGDKEISKDQILDQLGLGGSSRRGGSKGPQNGFPSSGLNRFLLPASECEFTLNSLLDELQSDQWPVKPGHRSQRCTGVALSVAAGLLGACLPGTGARIVALIGGPCTEGPGTIVSKDLSDPVRSHKDLDKDAAPYYKKAVKFYDSIAKQLVTQGHVLDLFASALDQVGVAEMKVAVERTGGLVVLSESFGHSVFKDSFKRVFEDGDQALGLCFNGTLEICCSQDIKIQGAIGPCSSLEKKGASVADTVIGEGNTSAWRLCGLDKTTCLTIFFDISSSGSNTPGAANPQFYLQFLTSYQNPEGQTLLRVTTVCRQWIDSAVSSEELVQGFDQETAAVVMARLASLKMESEEGFDATRWLDRNLIRLCSKFGDYRKDDPASFTLNPYFSLFPQFIFNLRRSQFVQVFNNSPDETAYFCMLLNRENISNATVMIQPSLTTYSFNSPAEPALLDVASIAADRILLLDAYFSVVVFHGMTIAQWRNMGYHHQPEHQAFAELLQAPQEDSQMIVRERFPVPRLVVCDQHGSQARFLLAKLNPSATYNNANEMSTGSDVIFTDDVSLQVFFEHLQKLVVQS

SEQ ID NO: 2429 - protein, 430 aa, Arabidopsis thaliana
MADIDIGTAATTGGNEGRGGTRERLINRENKFTRSVSHAQDELHSFRKYLRWMCVDQSSPWTAVLSWSMFVVFTLVVPATSHFMLACSDCDSHHSRPFVSKYGLRRFLFFDKLWDESETVRLGYTNQLNRSLKILSYFVSPCFLAMSSYKIWWYASGASQIPFLGNVILSDTVACLMELCSWLYRTTVIFLVCVLFRLICHLQILRLQDFAQVFQMDSDVGSILSEHLRIRRHLRIISHRYRTFILLSLILVTGSQFYSLLITTKAYAELNIYRAGELALCSMTLVTALLILLRSASKITHKAQAVTCLAAKWHVCATIESFETVDGETPRLVDRASGHGYYPTDDDNGESDSEDYGDEEDDFDNNNLIPAYAYSTISFQKRQALVNYFENNRSGITVFGFTLDRSTLHTIFGIEMSLVLWLLGKTIGIS

SEQ ID NO: 2430 - protein, 763 aa, Thermoplasma acidophilum
MGKIIRISGPVVVAEDVEDAKMYDVVKVGEMGLIGEIIKIEGNRSTIQVYEDTAGIRPDEKVENTRRPLSVELGPGILKSIYDGIQRPLDVIKITSGDFIARGLNPPALDRQKKWEFVPAVKKGETVFPGQILGTVQETSLITHRIMVPEGISGKVTMIADGEHRVEDVIATVSGNGKSYDIQMMTTWPVRKARRVQRKLLSRDPLVTAQSGNRCAFPVAEAANCRVPGPFGSGKCVSGDTPVLLDAGERRIGDLFMEAIRPKERGEIGQNEEIVRLHDSWRIYSMVGSEIVETVSHAIYHGKSNAIVNVRTENGREVRVTPVHKLFVKIGNSVIERPASEVNEGDEIAWPSVSENGDSQTVTTTLVLTFDRVVSKEMHSGVFDVYDLMVPDYGYNFIGGNGLIVLHNTVIQHQLAKWSDANIVVYIGCGERGNEMTEILTTFPELKDPNTGQPLMTGLSFIANTSNMPVAAREASIYTGITIAEYYRDMGYDVALMADSTSRWAEALREISGRLEEMPGEEGYPAYLGRRVSEFYERSGRARLVSPDERYGSITVIGAVSPPGGDISEPVSQNTLRVTRVFWALDAALANRRHFPSINWLNSYSLYTEDLRSWYDKNVSSEWSALRERAMEILQRESELQEVAQLVGYDAMPEKEKSILDVARIIREDFLQQSAFDEIDAYCSLKKQYLMLKAIMEIDTYQNKALDSGATMDNLASLAVREKLSRMKIVPEAQVESYYNDLVEEIHKEYGNFIGEKNAEASL

SEQ ID NO: 2431 - protein, 910 aa, Arabidopsis thaliana
MIRAIRACKTAAEERAVVRKECADIRALINEDDPHDRHRNLAKLMFIHMLGYPTHFGQMECLKLIASPGFPEKRIGYLGLMLLLDERQEVLMLVTNSLKQDLNHSNQYVVGLALCALGNICSAEMARDLAPEVERLIQFRDPNIRKKAALCSTRIIRKVPDLAENFVNAAASLLKEKHHGVLITGVQLCYELCTINDEALEYFRTKCTEGLIKTLRDITNSAYQPEYDVAGITDPFLHIRLLRLLRVLGQGDADASDLMTDILAQVATKTESNKNAGNAVLYECVETIMAIEDTNSLRVLAINILGRFLSNRDNNIRYVALNMLMKAITFDDQAVQRHRVTILECVKDPDASIRKRALELVTLLVNENNVTQLTKELIDYLEISDEDFKEDLSAKICFIVEKFSPEKLWYIDQMLKVLCEAGKFVKDDVWHALIVVISNASELHGYTVRALYKSVLTYSEQETLVRVAVWCIGEYGDLLVNNVGMLGIEDPITVSITMAILIHYLLHDKYADAFASWDFIFALKNMQRVCDCLEQVTESDAVDVIEDAITRHNSDSTTKAMALVALLKLSSRFPSISERIKDIIVKQKGSLLLEMQQRAIEYNSIVDRHKNIRWNPLSSLVDRMPVLDEATFNVRRAGSFPASVSTMAKPSVSLQNGVEKLPVAPLVDLLDLDSDDIMAAPSPSGTDFLQDLLGVDLGSSSAQYGATQAPKAGTDLLLDILSIGTPSPAQNSTSSIGLLSIADVNNNPSIALDTLSSPAPPHVATTSSTGMFDLLDGLSPSPSKEATNGPAYAPIVAYESSSLKIEFTFSKTPGNLQTTNVQATFTNLSPNTFTDFIFQAAVPKFLQLHLDPASSNTLLASGSGAITQNLRVTNSQQGKKSLVMRMRIGYKLNGKDVLEEGQVSNFPRGL

SEQ ID NO: 2432 - protein, 655 aa, Oryza sativa
METRDDVADASALPYSYSPLPAGDAASADLAAARRSRRRPLCVALFLASAAVILAVAVLSGVRLAGRPATTTMVVPGVVEMEMASRGPESGVSEKTSGAEEMVRLMGGAAGGEAFPWSNAMLQWQRTGFHFQPERNWMNDPNGPVYYKGWYHLFYQYNPDGAVWGNKIAWGHAVSRDLVHWRHLPLAMVPDQWYDVNGVWTGSATTLPDGRLAMLYTGSTNASVQVQCLAVPSDPDDPLLTNWTKYHANPVLYPPRTIGDRDFRDPTTAWRDPSDGDWRIVIGSKDEHHAGIAVVYRTADFVTYDLLPGLLHRVEATGMWECIDFYPVAGGEGVDMTEAMYARNKGVVHVMKASMDDDRHDYYALGRYDPARNAWTPLDAAADVGIGLRYDWGKFYASKTFYDPAKRRRVLWGWVGETDSERADVAKGWASLQLDTKTGSNLLQWPVEEVETLRTNSTDFGGITVDYASVFPLNLHRATQLDILAEFQLDPLAVDAVLEADVGYNCSTSGGAAGRGALGPFGLLVLADKRHRGDGEQTAVYFYVAKGSDGGVTTHFCQDESRSSHADDIVKRVVGNVVPVLDGETFSLRVLVDHSIVESFAQGGRSTATSRVYPTEAIYANAGVFLFNNATSARVTAKKLVVHEMDSSYNQAYMA

SEQ ID NO: 2433 - protein, 630 aa, Caulobacter crescentus
MSKIIGIDLGTTNSCVAIMDGKTPKVIENAEGARTTPSVVAFLEDGERLIGQPAKRQAVTNPTNTLFAIKRLIGRTASDPVVEKDKGMVPYRSSRARAGDAWVKAHGKDYSPQEVSAFILQKMKEAAEAHLGEPVTKAVITVPAYFNDAQRQATKDAGKIAGLEVLRIINEPTAAALAYGLDKNDGKKIAVYDLGGGTFDVSILEIGDGVFEVKSTNGDTFLGGEDFDLRIVDYLADEFKKEQGVDLRKDKLALQRLREAEKAKKELSSTAQYEVNLPFISMNASGPLHLNIKLSRAKLEALVDDLIARTIGPCEQALKDAGLKKSDIDEVILVGGMSRMPKVQQAVQDFFGREPHKGVNPDEVVALGAAVQAGVLQGDVKDVLLLDVTPLTLGIDTLGGVFTPLIERNTTIPTKRSQTFSTADDNQSAVTIRVFQGERAMAQDNKMQGQFDLVGIPPAPRGVPQIEVTFDIDANGIVQVHAKDKATNKEQSIRIQANGGLSDSDIERMVKEAEANKAADEKKKQLVEAKNQGEAILHSTEKALAEHGDKVGAAEKTAIETGITELKTALEGEDVEAIQAKTQALIQASMKLGEAMYAAQQGSAEGGDAKADDGVVDAEFEEVDDNKPAA

SEQ ID NO: 2434 - protein, 505 aa, Cicer arietinum
MGSRNIVQQQNRAEAAVPGAMKQKNIAGEKKNRRALGDIGNLVTVRGVDGKAKAIPQVSRPVTRSFCAQLLANAQTAAADNNKINAKGAIVVDGVLPDRRVAAARVPAQKKAAVVKPRPEEIIVISPDSVAEKKEKPIEKEKAAEKSAKKKASTLTSTLTARSKVASGVKTKTKEQIVDIDAADVTNDLAVVEYVEDMYKFYKSVENESRPHDYMGSQPEINEKMRAILIDWLVQVHHKFELSPETLYLTINIVDRYLASETTIRRELQLVGIGAMLIASKYEEIWAPEVHELVCISDNTYSDKQILVMEKKILGALEWYLTVPTPYVFLVRFIKASMTDSDVENMVYFLAELGMMNYATLIYCPSMIAAASHQVYAARCTLNKAPFWNETLQLHTGFSEPQLMDCAKLLVAFHKMAGDQKLKSIYRKYSNLERGAVALLSPAKSLFVFLIELLMNAIEKMQCSLFFTSEIWCRFLTCFGRNISPGCSLVLLQRNFLIPLILYAL

SEQ ID NO: 2435 - protein, 312 aa, Agrobacterium tumefaciens
MALATRATGGAGRRKPVRARCARGLHLVSCHKTQLLGFTIRNAASWTIHPQGCEDLTAAASTIIAPHDSPNTDGFNPESCRNVMISGVRFSVGDDCIAVKAGKRGPDGEDDHLAETRGITVRHCLMQPGHGGLVIGSEMSGGVHDVTVEDCDMIGTDRGLRLKTGARSGGGMVGNITMRRVLLDGVQTALSANAHYHCDADGHDDWVQSRNPAPVNDGTPFVDGITVEDVEIRNLAHAAGVFLGLPDVPSATSLSATSPIVSHDPSAVATPPIMADRVRPMRMRLVFEQADVVCDDPALLNDAPVSISSYFD

SEQ ID NO: 2436 - protein, 1408 aa, Oryza sativa
MAPHLHLRLLLVVGVALGSAGLGWGGGGGEGEATDREAPDPYSILTWHDYSPPSPPPPPPPPVAPAATCEGDLHGKGNFSTRCEVSEEVELGGDVYITGEGSLVLLAGAALTCQRPGCVISANLSGEVRLGRGVRVIAGRVSLAAANVTIADTVVVNTTALAGDPPERTSGVPTGTHGDGGGHGGRGASCYVKDGQTQEDSWGGDAYAWSDLEHPFSYGSKGGSTSVEKDYGGSGGGIVWLYADDLIMNGTVLADGGDSSEKGGGGSGGSIYIKSKTMHGAGKISASGGNGLAGGGGGRVSINVFSRHDDTQVFAHGGKSSGCPDNAGAAGTLYEAVPKSLVVSNNNLSTQTDTLLLEFPNQPLWTNVFVKNHAKVAVPLLWSRVQVQGQLSLLSGAILTFGLTRYPYSEFELMAEELLMSDSTIKVFGALRMSVKMLLMWNSKMLIDGGGDSIVATSLLDASNLIVLKESSVIHSNANLGVRGQGLLNLSGEGDIIEAQRLILSLFYSIKVGPGSILRGPLVNGSSGDVAPKLNCDDDICPVEIIHPPEDCNLNSSLSFTLQVCRVEDIDIWGLVQGTVIHFNRARSVSVHTSGTISATGLGCRSGVGQGKILNSGVSGGGGHGGRGGDGFYNESHAEGGSMYGSADLPCELGSGSGNDTTKLSTAGGGIIVMGSWEYSLPSLSLYGSVESNGQSSTDVVTNASIGGPGGGSGGTILLFVRALSLAESSILSSVGGLGNFGSGGGGGGRIHFHWSNIPTGDEYVPVAAVKGSIRTSGGISKGKGFPGENGTVTGKACPKGLYGTFCKECPLGTYKNVTGSSKSLCVQCPPDELPHRAIYTSVRGGAYETPCPYKCVSDRYRMPHCYTALEELIYTFGGPWLFGLLLSGLLVLLALVLSVARMKFVGTDELPGPAPTQQGSQIDHSFPFLESLNEVLETNRAEESHGHVHRMYFMGPNTFSEPWHLPHTPPEQISEIVYEDAFNRFVDEINTLAAYQWWEGSIHSILCVLAYPLAWSWQQFRRRKKLQRLREFVRSEYDHSCLRSCRSRALYEGLKVTATPDLMLGYLDFFLGGDEKRPDLPPRLRQRFPMCLIFGGDGSYMAPFSLHSDSVLTSLMSQAVPSSIWHRLVAGLNAQLRLVRRGSLRGTFLPVLDWLETHANPSLGVNGVRVDLAWFQATALGYCQLGLVVYAVEEPMSAELDGSPRIKIEQHSLITGGILDSNSLRTLKDRRDLFYPFSLILHNTKPVGHQDLVGLVISILLLADFSLVLLTFLQLYSYSMADVLLVLFVLPLGILSPFPAGINALFSHGPRRSAGLARVYALWNITSLVNVVVAFACGLVHYKSSTKRHPSTQPWNLGTDESGWWLFPTGLMLLKCIQARLVDWHVANLEIQDRAVYSNDPSIFWQS

SEQ ID NO: 2437 - protein, 91 aa, Daucus carota
PLVWTNTCCSHPLYRESELIEEKALGARNAAQRKLLDELGIPAEDVPVDQFLPVGRILYKAPSDGKWGEHELDYLLFIVRDVKVNPNPDEV

SEQ ID NO: 2438 - protein, 348 aa, Eucalyptus camaldulensis
MDANGVKQPLLSKPLNSPQTDKKELKRNRLRRCKSAPLAEAVPQEANLNGPVQPSNSILRNLHPSFKRVAIILVFYLGIGTMCFYLVRNEIDGEKTNDLFDAVYFCIVTMTTVGYGDLVPGSALTKLLACAFVFSGMAIVGLILSRAADYLVEKQEILLVKALHLRNKVGPTEMLKEIETNGVRYKCVTAFILLLLLIVAGTTFLALIENLDIVDAFYCVCSTITTLGYGDKSFSTEGGRIFAVFWILTSTICLAQFFLYIAELNTENRQRALVKWVPSRRMTNFDLEAADLDNDGVVGAAEFIIYKLKEMGKINQEDISLILEEFDDLDVDQSGTLSGSDITLAQSS

SEQ ID NO: 2439 - protein, 660 aa, Chlamydia trachomatis
MSEKRKSNKIIGIDLGTTNSCVSVMEGGQPKVIASSEGTRTTPSIVAFKGGETLVGIPAKRQAVTNPEKTLASTKRFIGRKFSEVESEIKTVPYKVAPNSKGDAVFDVEQKLYTPEEIGAQILMKMKETAEAYLGETVTEAVITVPAYFNDSQRASTKDAGRIAGLDVKRIIPEPTAAALAYGIDKEGDKKIAVFDLGGGTFDISILEIGDGVFEVLSTNGDTHLGGDDFDGVIINWMLDEFKKQEGIDLSKDNMALQRLKDAAEKAKIELSGVSSTEINQPFITIDANGPKHLALTLTRAQFEHLASSLIERTKQPCAQALKDAKLSASDIDDVLLVGGMSRMPAVQAVVKEIFGKEPNKGVNPDEVVAIGAAIQGGVLGGEVKDVLLLDVIPLSLGIETLGGVMTPLVERNTTIPTQKKQIFSTAADNQPAVTIVVLQGERPMAKDNKEIGRFDLTDIPPAPRGHPQIEVTFDIDANGILHVSAKDAASGREQKIRIEASSGLKEDEIQQMIRDAELHKEEDKQRKEASDVKNEADGMIFRAEKAVKDYHDKIPAELVKEIEEHIEKVRQAIKEDASTTAIKAASDELSTRMQKIGEAMQAQSASAAASSAANAQGGPNINSEDLKKHSFSTRPPAGGSASSTDNIEDADVEIVDKPE

SEQ ID NO: 2440 - protein, 607 aa, Arabidopsis thaliana
MDTKIGSIDACNPTNHDIGGPPNGGVSTVQNTSPLHSTTVSPCDATLGRYLARRLVEIGVTDVFSVPGDFNLTLLDHLIAEPNLKLIGCCNELNAGYAADGYARSRGVGACVVTFTVGGLSVLNAIAGAYSENLPLICIVGGPNSNDYGTNRILHHTIGLPDFTQELRCFQAVTCFQAVINNLEEAHELIDTAISTALKESKPVYISISCNLPAIPLPTFSRHPVPFMLPMKVSNQIGLDAAVEAAAEFLNKAVKPVLVGGPKMRVAKAADAFVELADASGYGLAVMPSAKGQVPEHHKHFIGTYWGAVSTAFCAEIVESADAYLFAGPIFNDYSSVGYSLLLKKEKAIIVQPDRVTIGNGPAFGCVLMKDFLSELAKRIKHNNTSYENYHRIYVPEGKPLRDNPNESLRVNVLFQHIQNMLSSESAVLAETGDSWFNCQKLKLPEGCGYEFQMQYGSIGWSVGATLGYAQAMPNRRVIACIGDGSFQVTAQDVSTMIRCGQKTIIFLINNGGYTIEVEIHDGPYNVIKNWNYTAFVEAIHNGEGKCWTAKVRCEEELVKAINTATNEEKESFCFIEVIVHKDDTSKELLEWGSRVSAANSRPPNPQ

SEQ ID NO: 2441 - protein, 530 aa, Arabidopsis thaliana
MERYTLLKEVGDGTFGNVWRAVNKQTNEVGTEVFYVQVAIKRMKKKYFSWEECVNLREVKSLSRMNHPNIVKLKEVIRENDILYFVFEYMECNLYQLMKDRPKHFAESDIRNWCFQVFQGLSYMHQRGYFHRDLKPENLLVSKDVIKIADLGLAREIDSSPPYTEYVSTRWYRAPEVLLQSYVYTSKVDMWAMGAIMAELLSLRPLFPGASEADEIYKICSVIGSPTEETWLEGLNLASVINYQFPQFPGVHLSSVMPYASADAVNLIERLCSWDPCNRPTTAEALQHPFFQSCYYIPPSLRPKLSEPRGSLEQQQSVKRLPAAPTYNANKPLNTYVTPKTNAPFSNGVNSYVTPKTNAPFSNGVNSYVTAKTNAPFSNGVNNYVAPKMNAPFDNGATQQKVDTTNNNNQNTAWNNKPVRSYNVKDSKYRPPGRKSPLAASMEKNWVFSRGASETANKLANATIGGRWTQSQRQQQPAMKAGLPIPTLGKSPVKLKDSVMAHLSYEPSSTPSPVVVLLIIIITYLRVQVI

SEQ ID NO: 2442 - protein, 1223 aa, Arabidopsis thaliana
MSGFFWNVRGLNKSSKHSVIKKWIEENNFQFGCLVETRVKESKVSQLVGKLFKDWSILTNYEHNRRGRIWVLWRKNVRLSPIYKSCQLLTCSVKLEDRQDEFFCSFVYASNYVEERKVLWSELKDHYDSPIIRHKPWTLLGDFNETLDIAEHSQSFVHPMVTPGMRDFQQVINYCSLTDMAAQGPLFTWCNKREHGLIMKKLDRVLINDCWNQTFSQSYSVFEAGGCSDHLRCRISLNSEAGNKVQGLKPFKFVNALTDMEDFKPMVSTYWKDTEPLILSTSTLFRFSKNLKGLKPKIRSMARDRLGNLSKKANEAYKILCAKQHVNLTNPSSMAMEEENAAYSRWDRVAILEEKYLKQKSKLHWCQVGDQNTKAFHRAAAAREAHNTIREILSNDGIVKTKGDEIKAEAERFFREFLQLIPNDFEGVTITELQQLLPVRCSDADQQSLIRPVTAEEIRKVLFRMPSDKSPGPDGYTSEFFKATWEIIGDEFTLAVQSFFTKGFLPKGINSTILALIPKKTEAREMKDYRPISCCNVLYKVISKIIANRLKLVLPKFIAGNQSAFVKDRLLIENLLLATELVKDYHKDTISTRCAIKIDISKAFDSVQWPFLINVFTILGFPREFIHWINICITTASFSVQVNGELAGYFQSSRGLRQGCALSPYLFVICMDVLSKMLDKAAAARHFGYHPKCKTMGLTHLSFADDLMVLSDGKIRSIERIIKVFDEFAKWSGLRISLEKSTVYLAGLSATARNEVADRFPFSSGQLPVRYLGLPLITKRLSTTDCLPLLEQVRKRIGSWTSRFLSYAGRLNLISSVLWSICNFWLAAFRLPRKCIRELEKMCSAFLWSGTEMNSNKAKISWHMVCKPKDEGGLGLRSLKEANDVCCLKLVWKIVSHSNSLWVKWVDQHLLRNASFWEVKQTVSQGSWIWKKLLKYREVAKTLSKVEVGNGKQTSFWYDNWSDLGQLLERTGDRGLIDLGISRRMTVEEAWTNRRQRRHRNDVYNVIEDALKKSWDTRTETEDKVLWRGKSDVFRTTFSTRDTWHHTRSTSARVPWHKVIWFSHATPKYSFCSWLAAHGRLPTGDRMINWANGIATDCIFCQGTLETRDHLFFTCSFTSVIWVDLARGIFKTQYTSHWQSIIEAITNSQHHRVEWFLRRYVFQATIYIVWRERNGRRHGEPPNTASQLVGWIDKQIRNQLSSICLKGDKRYDGSLQVWFQSRS

SEQ ID NO: 2443 - protein, 579 aa, Arabidopsis thaliana
MAAALRSNTSRETASLTLSHFRYFIFNRIHTARTATSPPHCNHRSKSDEKFPYKISSLGTSFLDNRGGGERRNSTKCYAAQKKLSGVGSSVVILSSQGDPPDLWQPPGDGVSVRVNGSSVNLGRGGGGGGSSPGGPGNGTGSNSKEDCWGGSNLGSDFPTPKEICKGLNKFVIGQERAKKVLSVAVYNHYKRIYHESSQKRSAGETDSTAAKPADDDMVELEKSNILLMGPTGSGKTLLAKTLARFVNVPFVIADATTLTQAGYVGEDVESILYKLLTVADYNVAAAQQGIVYIDEVDKITKKAESLNISRDVSGEGVQQALLKMLEGTIVNVPEKGARKHPRGDNIQIDTKDILFICGGAFVDIEKTISERRHDSSIGFGAPVRANMRAGGVTNAAVASNLMETVESSDLIAYGLIPEFVGRFPVLVSLSALTENQLMQVLTEPKNALGKQYKKMYQMNSVKLHFTESALRLIARKAITKNTGARGLRALLESILMDSMYEIPDEGTGSDMIEAVVVDEEAVEGEGRRGSGAKILRGKGALARYLSETNSKDSPQTTKEGSDGETEVEAEIPSVVASM

SEQ ID NO: 2444 - protein, 230 aa, Pyrococcus horikoshii
MNEMSSVRLPFRDGYYDVRPTKIVALAKNYAEHAREMGSEPPEEPIIFLKPPSALIGPGSSIILPRRSKRVDHEVELAVIMGKRAKNVPASKAFDYILGYTIILDITARDLQAEARKKGYPWTISKGFDTFAPIGPRVVDSRELDPSDLEIGLKVNGKIRQLGRTSQMIFKIPELIEYISHIMTLEPGDIIATGTPPGVGPLRHGDRIEAWIEGIGKMEFDVLAEDSILC

SEQ ID NO: 2445 - protein, 359 aa, Enterococcus hirae
MQIGKIIKVSGPLVMAENMSEASIQDMCLVGDLGVIGEIIEMRQDVASIQVYEETSGIGPGEPVRSTGEALSVELGPGIISQMFDGIQRPLDTFMEVTQSNFVGRGVQLPALDHEKPWWFEGTIEGGTEGSSGNLIGYLDETKVIQPKIMVPNGIKGTVQKIESGSFTIDDPICVIETEQGLKELTMMQKWPVRRGRPIKQKLNPDVPMITGQRVIDTFFPVTKGGAAAVPGPFGAGKTVVQHQIAKWSDVDLVVYVGCGERGNEMTDVVNEFPELIDPNTGESLMERTVLIANTSNMPVAAREASIYTGITIAEYFRKMGNKLAIMANSPFWWAEAPPENSRRLEEMPGDEGYPAYLG

SEQ ID NO: 2446 - protein, 294 aa, Nicotiana tabacum
MDQYEKVEKIGEGTYGVVYKARDRVTNETIALKKIRLEQEDEGVPSTAIREISLLKEMQHANIVRLQDVVHSEKRLYLVFEYLDLDLKKHMDSSPEFSKDPRLVKMFLYQILRGIAYCHSHRVLHRDLKPQNLLIDRRTNALKLADFGLARAFGIPVRTFTHEVVTLWYRAPEILLGSRHYSTPVDVWSVGCIFAEMVTQRPLFPGDSEIDELFKIFRVMGTPNEDTWPGVTTLPDFKSAFPKWPSKDLATIVPNLDGAGLDLLDKMLRLDPSKRITARNALEHEYFKDIGYVP

SEQ ID NO: 2447 - protein, 654 aa, Schedonorus arundinaceus
MESSAVVPGTTAPLLPYAYAPLPSSADDARENQSSGGVRWRVCAAVLAASALAVLIVVGLLAGGRVDRGPAGGDVASAAVPAVPMEIPRSRGKDFGVSEKASGAYSADGGFPWSNAMLQWQRTGFHFQPEKHYMNDPNGPVYYGGWYHLFYQYNPKGDSWGNIAWAHAVSKDMVNWRHLPLAMVPDQWYDSNGVLTGSITVLPDGQVILLYTGNTDTLAQVQCLATPADPSDPLLREWIKHPANPILYPPPGIGLKDFRDPLTAWFDHSDNTWRTVIGSKDDDGHAGIILSYKTKDFVNYELMPGNMHRGPDGTGMYECIDLYPVGGNSSEMLGGDDSPDVLFVLKESSDDERHDYYALGRFDAAANIWTPIDQELDLGIGLRYDWGKYYASKSFYDQKKNRRIVWAYIGETDSEQADITKGWANLMTIPRTVELDKKTRTNLIQWPVEELDTLRRNSTDLSGITVDAGSVIRLPLHQGAQIDIEASFQLNSSDVDALTEADVSYNCSTSGAAVRGALGPFGLLVLANGRTEQTAVYFYVSKGVDGALQTHFCHDESRSTQAKDVVNRMIGSIVPVLDGETFSVRVLVDHSIVQSFAMGGRITATSRAYPTEAIYAAAGVYLFNNATGATVTAERLVVYEMASADNHIFTNDDL

SEQ ID NO: 2448 - protein, 529 aa, Pseudomonas aeruginosa
MKTRNDVANKGRLSLPGKPTKTSGNEQPGEPHMIDGLLRSLGLDPNAFRDGELAVHTPIDGSRLAAVRLEGRAAVAAKVERAEQAFRAWRQVPAPRRGELVRLFGEELRRHKAELGELVSWEAGKITQEGLGEVQEMIDICDFAVGLSRQLYGLTIASERPGHHMRETWHPLGVVGVISAFNFPVAVWSWNTALALVCGNSVVWKPSEKTPLTALACQALFERAARAFGGDAPAHLSQLLIGDREAGEALVDARRVALVSATGSTRMGREVAPRVAARFARCILELGGNNAMILAPSADLDLAVRGILFGAVGTAGQRCTTLRRLIAHESVKDEIVERLKAAYSRVRIGHPLEGNLVGPLIDERSYLAMQDALARAREQGGRVFGGERQLQERYPDAYYVSPAIVEMPGQTEVVRTETFAPILYVVGYRDFDEALRLNNEVPQGLSSCIFTTDLREAELFQGAAGSDCGIANVNIGTSGAEIGGAFGGEKETGGGRESGSDAWKAYMRRQTNTVNYSRELPLAQGITFD

SEQ ID NO: 2449 - protein, 477 aa, Pseudomonas aeruginosa
MTADKKAKILATLGPATRSRDDIRALVEAGANLLRLNFSHGDYADHAQRFAWVREVEAELNYPIGVLMDLQGPKLRVGRFAAGAVQLQRGQTFTLDLSDAPGDERRVNLPHPEIIHALEPGMSLLLDDGKIRLEVVNCHSDAIETRVAVGGELSDRKGVNVPEAVLQLSPLTDKDRRDLAFGLELGVDWVALSFVQRPEDIDEARGLIGDKAFLMAKIEKPSAVSAIEAIAERADAIMVARGDLGVEVPAESVPGIQKRIVQVCRQLGKPVVVATQMLESMRFSPAPTRAEVTDVATAVGAGADAVMLSAETASGQYPREAVEMMAKIVRQVEAEPDYHVQLEVNRPQPDATVSDAISCAIRRVSRILPVAVLVNYTESGNSTLRAARERPKAPILSLTPNLRTARRLTVAWGVYSVVNEQLAHVDEICSTALDIALAQRMARRGDTVVVTAGVPFGRPGSTNMLRIETVAPPLGDL

SEQ ID NO: 2450 - protein, 426 aa, Pseudomonas aeruginosa
MTDTRNGEDNGKLLYCSFCGKSQHEVRKLIAGPSVFICDECVDLCNDIIREEVQEAQAESSGHKLPAPKEIRTILDQYVIGQERAKKVLAVAVYNHYKRLNQRDKKDDIELGKSNILMIGPTGSGKTLLAETLARLLNVPFTIADATTLTEAGYVGEDVENIIQKLLQKCDYDVEKAQMGIVYIDEIDKISRKSDNPSITRDVSGEGVQQALLKLIEGTVASVPPQGGRKHPQQEFLQVDTRNILFICGGAFAGLERVIQNRSARGGIGFNAEVRSQEMGKKVGEAFKEVEPEDLVKFGLIPEFVGRLPVIATLDELDEAALMQILTEPKNALTKQYAKLFEMEGVDLEFRPDALKAVARKALERKTGARGLRSILEGILLDTMYEIPSQQDVSKVVIDESVIDGSSQPLMIYENSEKPAKAAPEA

SEQ ID NO: 2451 - protein, 336 aa, Pseudomonas aeruginosa
MSRVTLSRYLIEQTRSHNTPADLRFLIEVVARACKEISHAVSKGALGGVLGSMGTENVQGEVQKKLDVMSNEILLEANEWAGNLAGMASEEMDHPYQIPGRYPKGAYLLVFDPLDGSSNIDVNVSVGTIFSVLRCPNEYLNQNDTLREEAFLQPGTTQVAAGYAIYGPQTMLMLTLGNGVKGFTLDRELGSFVLTHDNISVPESTAEFAINMSNQRHWEAPVKRYVEELLAGKEGPLGKNYNMRWIASMVADVHRILTRGGVFMYPRDAREPEKPGKLRLMYEANPMSFIIEQAGGAATNGTQRILDIKPENLHQRVAVFLGSKQEVERITGYHAE

SEQ ID NO: 2452 - protein, 470 aa, Escherichia coli
MKKTKIVCTIGPKTESEEMLAKMLDAGMNVMRLNFSHGDYAEHGQRIQNLRNVMSKTGKTAAILLDTKGPEIRTMKLEGGNDVSLKAGQTFTFTTDKSVIGNSEMVAVTYEGFTTDLSVGNTVLVDDGLIGMEVTAIEGNKVICKVLNNGDLGENKGVNLPGVSIALPALAEKDKQDLIFGCEQGVDFVAASFIRKRSDVIEIREHLKAHGGENIHIISKIENQEGLNNFDEILEASDGIMVARGDLGVEIPVEEVIFAQKMMIEKCIRARKVVITATMMLDSMIKNPRPTDAEAGDVANAILDGTDAVMLSGESAKGKYPLEAVSIMATICERTDRVMNSRLEFNNDNRKLRITEAVCRGAVETAEKLDAPLIVVATQGGKSARAVRKYFPDATILALTTNEKTAHQLVLSKGVVPQLVKEITSTDDFYRLGKELALQSGLAHKGDVVVMVSGALVPSGTTNTASVHVL

SEQ ID NO: 2453 - protein, 470 aa, Escherichia coli
MKKTKIVCTIGPKTESEEMLAKMLDAGMNVMRLNFSHGDYAEHGQRIQNLRNVMSKTGKTAAILLDTKGPEIRTMKLEGGNDVSLKAGQTFTFTTDKSVIGNSEMVAVTYEGFTTDLSVGNTVLVDDGLIGMEVTAIEGNKVICKVLNNGDLGENKGVNLPGVSIALPALAEKDKQDLIFGCEQGVDFVAASFIRKRSDVIEIREHLKAHGGENIHIISKIENQEGLNNFDEILEASDGIMVARGDLGVEIPVEEVIFAQKMMIEKCIRALKVVITATMMLDSMIKNPRPTRAEAGDVANAILDGTDAVMLSGESAKGKYPLEAVSIMATICERTDRVMNSRLEFNNDNRKLRITEAVCRGAVETAEKLDAPLIVVATQGGKSARAVRKYFPDATILALTTNEKTAHQLVLSKGVVPQLVKEITSTDDFYRLGKELALQSGLAHKGDVVVMVSGALVPSGTTNTASVHVL

SEQ ID NO: 2454 - protein, 355 aa, Aspergillus oryzae
MSGHENNGAPPVGKEKINTDIVTLTRFLTEEQTKVPEATGDFTLLCHALQFSFKSIAYYIRCAFLINLTGLAGSSNTTGDDQKKLDVIGNDIFISAMRGSGKCRILVSEEEEEAIIFDEHPYARYAVVCDPIDGSSNLDAGVSVGTIFGIFKLPDSVLGPENKVSPKDLLLPGTEMVASGFTMYGASAQLVITMRNGGVNGFTLENSLGEFILTHPNMTLPAKRAIYSVNEGNSSYWEEWTNAYFHSLKFPPEGQKPYSARYIGSMVADAYRTLLYGGVFAYPADKKAPKGKLRILYECAPMAMLFENAGGLAVNSRMERLLGVVPEHIHDKSGVFLGSKDEVQKIIDTYNKYKK

SEQ ID NO: 2455 - protein, 326 aa, Candida albicans
MTGSSSQFQQLEKLGEGTYATVYKGRNRATGALVALKEISLDSEEGTPSTAIREISLMKELDHENIVTLYDVIHTENKLTLVFEYMDKDLKKYMEVHGQQSALDLKVVKSFMFQLLKGIMFCHDNRVLHRDLKPQNLLINNKGELKLGDFGLARAFGIPFNTFSNEVVTLWYRAPDVLLGSRAYTTSIDIWSAGCIFAEMCTGKPLFPGTANEDQLIKIFRLMGTPNERTWPGISQYTNYKNNWQIFVPQDLRLIVPNLDSMGLNLLQSLLQMRPESRITARQALQHPWFHEITMPNAVPQHLSDPYQQQQQQQQHPHQPIIDQQY

SEQ ID NO: 2456 - protein, 526 aa, Aspergillus oryzae
MAASSSLDHLSNRMKLEWHSKLNTEMVPAKNFRRTSIIGTIGPKTNSVEKINALRRSGLNVVRMNFSHGSYEYHQSVIDNAREAARVQTGRPLAIALDTKGPEIRTGNTTDDKDIPIKEGHELNITTDEKYANASDDQNMYLDYKNITNVIAPGKLIYVDDGILSFQVLEVVDDKTLRVKCLNNGNISSRKGVNLPGTDVDLPALSEKDISDLKFGVKNGVDMIFASFIRRGSDIRHIRDVLGEEGKEIQIIAKIENQQGVNNFDEILEETDGVMVARGDLGIEIPAPKVFIAQKMMIAKCNIKGKPVICATQMLESMTYNPRPTRAEVSDVANAVLDGADCVMLSGETAKGSYPCEAVKMMSETCLLAEVAIPHFNVFDELRNLAPRPTDTVESIAMAAVSASLELNAGAIVVLTTSGNTARLLSKYRPVCPILMVTRNPRASRYSHLYRGVWPFLFPENKPDFNVKIWQEDVDRRLKWAISHGIKLGIINKGDNIVCVQGWRGGQGHTNTVRVVPAEENLGLIE

SEQ ID NO: 2457 - protein, 417 aa, Arabidopsis thaliana
MAASAATTTSSHLLLSSSRHVASSSQPSILSPRSLFSNNGKRAPTGVRNHQYASGVRCMAVAADASETKTAARKKSGYELQTLTGWLLRQEMKGEIDAELTIVMSSISLACKQIASLVQRAGISNLTGVQGAINIQGEDQKKLDVISNEVFSNCLRSSGRTGIIASEEEDVPVAVEESYSGNYVVVFDPLDGSSNIDAAVSTGSIFGIYSPNDECIVDDSDDISALGSEEQRCIVNVCQPGNNLLAAGYCMYSSSVIFVLTLGKGVFSFTLDPMYGEFVLTQENIEIPKAGRIYSFNEGNYQMWDDKLKKYIDDLKDPGPTGKPYSARYIGSLVGDFHRTLLYGGIYGYPRDAKSKNGKLRLLYECAPMSFIVEQAGGKGSDGHSRVLDIQPTEIHQRVPLYIGSTEEVEKLEKYLA

SEQ ID NO: 2458 - protein, 262 aa, Tagetes erecta
ARAQSQSTLFFSPSIYTKNNSNLLRRSYSAMGDDSGMDAVQRRLMFNDECILVDECDNVVGHDTKYNCHLMEKIETGKMLHRAFSVFLFNSKYELLLQQRSATKVTFPLVWTNTCCSHPLYRESELVPENALGVRNAAQRKLLDELGIPAEDVPVDQFTPLGRMLYKAPSDGKWGEHELDYLLFIVRDVAVNPNPDEVADIKYVNQEELKELLRKADAGEEGLKLSPWFRLVVDNFLFKWWDHVQKVTLTEAIDMKTIHKLI

SEQ ID NO: 2459 - protein, 498 aa, Arabidopsis thaliana
MATNYNEKLLLNYVPVYVMLPLGVVNVENVFADPETLETQLKRLKEEAGVDGVMVDVWWGIIESKGPKQYDWTAYKTLFQLIARLGLKIQAIMSFHQCGGNVGDIVTIPIPQWVRDVGDNDPDIYYTNRKGTRDIEYLSIGVDNLPLFAGRTAVQLYSDYMSSFKENMADLIEAGVIVDIEVGLGPAGELRYPSYPQSQGWVFPGIGEFQCYDKYLKKDFKEAAAKAGHPEWDLPEDAGEYNDKPEETGFFKKDGTYVSEKGKFFMTWYSNKLIFHGDQILGEANKIFAGLKVNLAAKVSGIHWLYNHHSHAAELTAGYYNLFKRDGYRPIARMLSKHYGILNFTCLEMKDTDNTAEALSAPQELVQEVLSKAWKEGIEVAGENALETYGAKGYNQILLNARPNGVNPNGKPKLRMYGFTYLRLSDTVFQENNFELFKKLVRKMHADQDYCGDAAKYGHEIVPLKTSNSQLTLEDIADAAQPSGALKWDSETDLKVDG

What is claimed is:

1. Transgenic plant seed having in its genome a recombinant DNA construct comprising at least one oil-associated gene operably linked to a promoter that is functional in said plant to transcribe said oil-associated gene.

2. Transgenic plant seed of claim 1 that grows into a plant having enhanced seed oil as compared to wild type.

3. Transgenic plant seed having in its genome a recombinant DNA construct comprising a gene suppression DNA operably linked to a promoter that is functional in said plant wherein transcription of said gene suppression DNA suppresses expression of an oil-associated gene.

4. Transgenic plant seed of claim 3 wherein transcription of said gene suppression DNA produces a dsRNA.

5. Hybrid maize seed that is produced by crossing two parental maize lines where at least one of said parental maize lines is a transgenic maize line that has in its genome a recombinant DNA construct comprising at least one oil-associated gene operably linked to a promoter that is functional in said plant to transcribe said oil-associated gene.

6. Hybrid maize seed of claim 5 wherein said parental maize lines are selected to produce maize plants characterized by agronomic traits where seed oil level for said maize plants is greater than seed oil level in the parental lines.

7. Hybrid maize seed of claim 5 wherein said parental maize lines are selected to produce maize plants characterized by agronomic traits where there is essentially no reduction in yield and standability traits in said maize plants as compared to the parental lines.

8. Hybrid maize seed according to claim 5 having in its genome recombinant DNA constructs for expressing 2 or more oil-associated genes.

9. A method of producing hybrid maize plants having enhanced levels of seed oil as compared to the closest non-transgenic ancestor maize hybrid for said plants, wherein the method comprises producing a transgenic maize plant having in its genome a recombinant DNA construct comprising at least one oil-associated gene operably linked to a promoter that is functional in maize to transcribe said oil-associated gene and crossing transgenic progeny of said transgenic maize plant with at least one other maize plant to produce said hybrid maize plants having enhanced levels of seed oil.

10 A method of breeding maize with higher oil comprising selecting from a breeding population of maize plants one or more selected maize plants based on allelic polymorphisms at one or more maize oil markers associated by linkage disequilibrium to genes conferring a higher seed oil-related trait, wherein the selected maize plant has 1 or more higher oil alleles linked to a maize oil marker.

11. A method of breeding maize according to claim 10 wherein said selected maize plant has 2 or more higher oil alleles linked to a maize oil marker.

12. A method of breeding maize according to claim 10 wherein said selected maize plant has 3 or more higher oil alleles linked to a maize oil marker.

13. A method of breeding maize comprising selecting a maize line having a haplotype characterized by one or more of the maize oil markers.

14. A recombinant DNA construct comprising a promoter functional in plants operably linked to an oil-associated gene.

15. A polymorphic maize DNA locus that is useful for genotyping between at least two varieties of maize; wherein said locus comprises at least 20 consecutive nucleotides that include or are adjacent to a maize oil marker; and wherein the sequence of said at least 20 consecutive nucleotides is at least 90% identical to the sequence of the same number of nucleotides in either strand of a segment of maize DNA that includes or is adjacent to said marker.

16. An isolated nucleic acid molecule useful for detecting a polymorphism associated with oil in maize, wherein said nucleic acid molecule comprises at least 12 nucleotide bases and a detectable label, and wherein the sequence of said at least 12 nucleotide bases is at least 90 percent identical to a sequence of the same number of consecutive nucleotides in either strand of a segment of maize DNA in a locus of claim 15.

17. A pair of nucleic acid molecules wherein each nucleic acid molecule of said pair is a nucleic acid molecule according to claim 16, and wherein each of said molecules has a distinct fluorescent dye at the 5′ end thereof and has identical nucleotide sequence except for a single nucleotide polymorphism.

18. An isolated nucleic acid molecule useful for detecting a polymorphism in maize DNA, wherein said nucleic acid molecule comprises at least 15 nucleotide bases, wherein the sequence of said at least 15 nucleotide bases is at least 90 percent identical to a sequence of the same number of consecutive nucleotides in either strand of a segment of maize DNA in a locus of claim 15.

19. A method of breeding maize comprising selecting a maize plant having a polymorphism associated by linkage disequilibrium to a seed oil-related trait wherein said polymorphism is linked to a locus of claim 15.

20. A method of associating a seed oil-related trait to a genotype in maize comprising
(a) identifying a set of one or more seed oil related traits characterizing said maize plants,
(b) selecting tissue from at least two maize plants having allelic DNA and assaying DNA or mRNA from said tissue to identify the presence or absence of a set of distinct polymorphisms comprising at least one polymorphism linked to a locus of claim 15, and
(c) identifying associations between said set of polymorphisms and said set of traits.
